United States Patent Application Publication US 2009/0215711 A1 - sequence listing, part 2

SEQ ID NO: 177 - DNA, 538435 bp, Mus Musculus
  misc_feature (1)...(538435): n = A,T,C or G
acaattgtgatgacccattggcctctttcctctcaccgaaggctttctccagttcctcagatctcactggaagttccagctcagctcaactgaatgggagaatgggtaagtattgtgattaagcttgcaatccaagtgttagataaagacattgtgagtgctaaggagaaacttccttgttctgtctatacaggagtctcatccaaagtcacagtgcagaaataaatctaggaggttaagtctatagcagaaatacttcccatcatgtaataaataatcaacatgtccctctagcactacgatccactaaggacttacctgtgtattttttctgttgttgtagttgtgtgaggtactgactttgggacccattttcatgaatattaggacattgctctgccataggagccgatagtcatcatatgaaattctctgagtgtatgaacttgtgtatagactgcaacatgtgagtgtatatggatgaaacgtgtgagtgtatatggataacatgtgagtgtatatggatgcaacatgtgagtgtatatggatgcttgcatgtatgcaattgtatgatgtggaaggggctcaggacaaacttgaatgatattttttaggtgtcatataaccttatgagaaaggatatctcattttcctagagcttgacgattaggctgctgtttctgtcctccagaggtagtactataagcaggtactaccatgcctgtttgttgtttaacatagggacagtgggatcaaactcacatcctcatggttttatgtaatcattccatccacagaaccatccccaaccctatgaatttctcttttgatcatagtaagaaatattagaggatgttatatatttaaacatttattttattatgtacattttatacatcagcacaactaggtagcaaaacatgcttcatgacaagttaataaaatgtttattaaaatatttcagtatatttaattttatagtgagattaatattactatttaaagtatatattaaatgtacttaattaatataagaatataaataatatataatactacaatatagagagcatcatgtgtaagtacttagtctggtaaaactagagtagttacacttgacttgtctgttatgaaaagtgtacttaactaatatgatgtttatatatttagctatattttgatattgattttgtgatgtagagagattaatatagaaactaatttgtcttgttttgaaaagaatttaacctctaaaaatttaaaatctgattattataagcttatccttgatttaaaatagttgagtgccctggctagggagatggctcagtgtgaaaagtacttgcatgaaggcagaggtcatatccctagaacccatgtatatgccagaagggtatggtagctgcctgcagtcctgacactcaggataaattaacagatcatgcctagagcaagatagctggcaagactagccaaatagtgacttcctcatctctaagacagcttgctgcaacatatcaggtgaagagcaactaagtactacctctagagttttctttctgttcccttgattaaaaacactctgaacaaagcaacttaggggaggaagtgtttatttaagcttctggattccaactcataattgaaagaaccctggacaagaattcacaaagaaatctgaagataggctgcttgctgttgcattacctctaaccaaagatttcactttctgccaaagaagtatagtagaaatcgtggaggagtagactgttgcctgatgatttggttacagccttaacaagctttttagtacagcatgaaaccacctgtccagaagtgtggtgtccttcctacatctattaatgattaagaaaatccccatagacatgcccttaggcaaatctggtctcttagtcaagaagcttttcttgggtgcttcgagactatattaggttgataattaaagctatctagggcaatgctgatgtcaactttgggcctccttatatataaattagtacatgtgcatccacatacattcacacgcacacatacacacacacacacaccctctcctgtgcacacatttaaacataccatacacaaatgtatataaaattttgttggcaagtatgcagtattcattggtcttttttaatttatgcctctctactgtacataaaataggtgtattaggatgactattttgtatttcccctattttgatttacctttgagttctaaaatgtattgtagttaattattgattattgctattgatgtatcaaacttcaaaggattaatttgttaacaccttatgatttttgaatatcaattctgatttatagatatgtttttactcttgtagtttagttcatgatagatgttacaaggttactattataatgttatttataacaaaaaaaaacagagtcagaatttatttgaaaattcatctaagaatacagatttttctccttaattttttttggagaaaatggaagaaaaaatgcttaagcactgaacatgagtgtttttcttgccatggttcccaaacaatactgtacagcagttatttatttagcatttacaacatattagatgttatagagagtcactgttctgtcattttataccaaaaatattgaacatctgtaggtgctatgaatgtttctggaactgaagctttaagatgccaacaggctgtaaaatgctaaaaggaaaataaaaaaaaggctcattatagcacagtggagagattattgatgtaattactgttatgatactggtatgtgattagtcatataaattaataccaaattgtattagttgttttaggtatattattttattaatccataaaaaaactacagtcagtcattaattacaactttttcacactaaataaagttgttgaacttcagagtagttacatagttttcccaacatcacacagtagtaaaatatttgggtccaaacccaaatcaaatgaattcaggatttagcatgctcactactgctgtaacagcagattggttcattaacaaagctgtgagcagaatggagcagtacaaaaagggatggcagagaaacaattcagctggggctcacatactagctatgacactgtggagttccatgggtataaacaaaccacttaataagctcagattcatattcatattagtaagttcatattcagacatctctggatgatacctgtcttgcagtatcacctggaaaaacagactgcatatccatgttgagaagagcttccccactacaggactgaaagctaagagtcaggcactgagatcccattttgatttcaggaaaaaacatatgttgagacattttaatacagttctaaatgtgcttcccaagacagtttgtctcatctttattcaaattgtgggatacccaatcatcacactctgggaactccttatccacttacagggattctaagggtctaattttaggccagtaacctctgtactggactgatatttactggagagagtatctctgttaatgactatttatacctgcccttttctgatttggtgagagagaagactgcctcctagcttatccttgttagactctaaacagatatgattgaacagaaacttcagtcatgaaaatgggatgcacagattagaactcccccctctagctcagtgtacaatatactgttaggaagttttgtttacagtgcctcatttttccttagggaatagcaaacgatggatccaggaaaattagaacccacccccacccccatgtgtgtgtctgaatcacctggccatttgctagtgacattgcccaaaacatcatgcagatgttttgtgaggctattgataaagtgaatatacaaaatgtttctggaaggtttcaaaacgcaagcagaggtacaagccaatagtttatgccaattaagaaatagacagtgcttctgtgattattcaagagtacctcttatgtgttagtcactgcactagaacccccacgcatcattgctcaaaacaaacaggaaggctatttgtaaaaagttgatggtttgagacatggctcagttggctaagtgctctcttcacaaacatgatgatctgactccatcaaccatacaaaaatccaggaatagtagtatttataggaacccaagagttgtgaggggtaaataaagtcagaaggaacactgggccatgctgattgcatactataaccagaccagtgtgctaccatttcaatgagagactttgcatcaaaaggaaaaaaaatgatatggtggaggtgatggaaaaatggttaagaatacttgtttactcttcctgaagaccccagctatcataactggtggctacaaacacttgctacttcactttcagtgactatgtcatcttcagacccacacgggcatgtcacacacatgcaaatagccacacatagacacaaagacacaaatattaaaataataaaataaatattttaatagttagtttgcaacatgttgtataattatttaatctcaattttgggtttctacctgccattgatcattcagttcccaaacaaaagacgcacacttttatttttataataaaccctaatcagcactggagccaggcatgtatctatcctctttgttattaccattccccatcaataaccccaaattataatttgctaagatccatctaggctgttcttaactccagttgtccagctctcatgaccatgtattcataactcaccccatggcagcttcttcctctctcgcccttctctctccctagtggtctcccctaaccacaagcctggaaaccaaagatctctctcactgtctccttattcaccaatcagaaatagcttgtgtgtatgtgggcgggggggggggcaagtttatatcacttacctatgtcacttgggtatatggagactttcctgtccctggaagcatctaggtcttgggggccaatatttagcattataaatacaagcaaaagaccaaagctcagcagtatctcttttgggaatgtaaacacataatttaagaactcaaattttttaaactgtatgcacatataaatggataaagtaataaatatgtgtgcattcaaatatatatctaacatagggaatatgtgcacacttgttataaaagatgaaagtatggtaacgttataaagaacaaattttgtcctgtagctaggaggtagtggcgcacaccttcaatactagcacttgggaggcagagacatggagatttccaagtttgaggccagcctggactacaaagtgagttccaggacagccagagctatacagagaaaccctgtctcgaaaaaaccaaatccaaaaccaaaacaaacaaacaaaaatttgtcctgtgaatggacaggcaagtatacaatttagcaacccaagaatataccacttagcattaatttatattgaaaattacaccaaaatgatttctttttcttcttctcagactagatttatgacctgtctataaactatcaaggctcaaaacaaatgagagcctgaccgtcccatttctacatggagtttttaaatttctttgttttaataatggacagacatcaaataaaacccactagagcaaagagttccacagtacaaaatgctcaatgctctgagagccacaaaggtatcaaagaacttcattagtactaaattgtgtgtctagaaatttagtcttgttgctagcttatgtaatgtacaattgaaaaatcaggggagaaatatctacttatggtgtagaaaaccttactgcttcacttcttagaacagtggccacttccatatccaagatgcagagcttcagcacagggtgaaatgccatggctataccagaaatttaccagtaattcaccttccacatcctcactccatacaggggcaccctctatatgtctctgtcaaaaggattcacttaactttgctaatgtacgggtaaatagatgtgcatgattcttattagctcagttacttcccccagtggtgttactgaagcataagtaataaaataagtgtgttatatgtcatgctgtgatgatttgacatctacacacattataaagtggttaagacaatcagattagttgatacctccttctcttcccatactcccttttgggcatgttcaatcttgtcagatttgaagtgtgcagaagcagattgtcattaatagttaactatgatgtgtcactgtagtgtcagaattcttctgctgtttcagcaattgaatttttagttcaggctggcctgaacctcactttgcagcacaagatgaacttgaacttctgatcctccatgtgctgtgtcctcagtgctgtgaatccacaaatttagggacatacatggattatacagtgctggtgaaccatccctggcaagcactttatcaatagagctccatctccagcctctcagacatagtgtttccataacagtatacaatttcagcattctattttagttttcaacattccattctctccttcttatctccatctattacaaaatcactgcctcttctaaatatctacacaccaattttgccacaggcatatatacaaacacatacactcaaacatatccatctcctctaaactaaatttaaactctcagagattggggattaaggttcacatgcaggggatcatgaacttgacagccagtcccacagcccccacaggaggctccactcccaggtgctctagtaatcccaggatcttaggatcagggatgagtagaatacaacatcaattccaataccaatagtgactgggaccagtaggatccagggacacaggatccctgcctgaccagtggcttggtttccttctggactgtgccagtttaccatgggctcgaactcagcagtcagtcccacagcccacaaaggaggttccactctcaggcactctagcacactcaggatcctgggatcacatgtttccagtatccaggagcttggtcacacaaggacctcagggtctcacaggcagcttgactcctaaaaactctgacacaccaagaatttcaggatcacaggatccaagaatcataggatcacagaaacagctggactctgaggcgttctgactcaacagcattagaggaatgagaggcaccagtaagatataggaagggaacagagcactagaaataataagatggtaggaagcaagcataaatacataagcaacagataccaaggttagttggcatcatcaaaacccagttctcccaccatagcaagtcctggatacactatcacaccagaaaagcaagacttggatctaaagtcacttctcatgacaatgacacagggctttaagaaagacaaaaataaataccttaaagaaatacaggagaacacaggtaaacaggtagaaaaccttaaagaggaaacacaaaaatcccttaaagaattataagaaagccaggtgtggtggtgcaagcctttaatcccagcactggggaggcagaggcaggcagatttctgagtttgaggttagcctggtctacagagtgagttccaggacagccagggctacacagagaaaccctgtctcaaaaaacaaaagcaaaacaaaacaagacaaaacacaaacaaacaaacaaaaaacaaacaaacaaacaataaacaatcaaacaggcaaaggaaatgagcaaaacctccaagatctagaaatggaaatagagacaataaagaaatcacaaagggagacaaccctggagttaagcaacctaggaaagagatcaggagtcatagatgcaaacatcaccaaaagaatgcaagagatagaagagagaatctcagaggcagaagataacatagaaaacattgacacaacagttaaagaacatgcaaaaatgcaaaaatcccaaaagatccaggaaatcaacgacacaaagagaagaccaaacctaaagataataggtatagaagagagtgaaaattccaaacttaaagggccagtaaatatcttcaacaaatttatagaagaaaatttccctaatctaaagaaagagatgcccatgaacatacaagaagtgtacagaactccaaatagattggaccagaaaagaaatatctcctgtcacatactattcaaaccaccaaatgcattaaattctttgtttacaaggaaaggatattaaaatcagtaagggaaaaaggtcaaataacatataaaggcaaacctatcagaaatacaccagacttctcatcagagagtaagaaagctagaagatcctgagcatatgctctaaagaccctaagagaacataaacaccagcccagattattatacacggcaaaactcttacttaccatatatggagaaaataagatatttcacaacaaaaccaaattaaaaatataaataatatttttccacaaatccagctctacaaagaatattgaaaaacaccaatacaaagagtgaaactactcactagaaaaaacaagaatgtcatctttcaacaaacccaaaagaagataggcacacaaacataattccacaactaacaacaaaaataacagggagtatcaatcacttttccttaataacaatatcaatcccaatatcaatggactcaatttcccaataaaaagacatagactaacagactcgatatataaataggaactagcattttgctgcatacaggaaatgcacctcagtgacaaggacagacactacctcagatttaaaggttggaatacaattttccaagcaaatagtcccaagagacaagctggattagctattctaaaacaaataaaatctagtttcaaccaaaagttatcaaaaacaataaggaaggacacttcatactcatcaaaggaaaaatctaccaagatgaactctcatttctgaacatttatgctccaaatgcaaggtcatccacattgataaaagaaactttattaagctcaaagcatacattgcacctcacacaataatagtgggagtctttagcaccctacttgcagcaatggacagatcatggagaaagaaactgaacagtcacagaatgaaactaacagaagttatggaacaaatggatctaatagatatttatagaacatttcatcctaaagccaaaaaatatactttcttctcagcacctcattgtgtcttttccaaaactggccacaaaacaaggctcaacagacaaaagaggattgaaataatcccatgcaccctatcagatcacaacaaactaaggctggttttaaattccaaaaacaaaacaaaacaaaacaaagcaaaaaacaatggaaaacacatatacacatggaactgagcaatgctcttctcaatgataatttgggcaaggacaaaataaaggaagaaattaaagactttttagattttagtgaaaatgaagacacatcattccaaaatttatttacttacacaatgaaagtagtaggaggaggaaactcatagctctaagtgcctccaaaaagaaactggagagagattacactagcagcttaacagcgtacctgaaaactttattacaaaaagaaggaaatactaccaactgtagtatacagcagaaaataatcaaactcagggctgaaaccaacctatagaagcaaaaagaactatacaaagaattaacaaaaccaggagctggcttgttgagaaaatcaatgagataggcaaacccttagccagacaaaccagagggcaaacagacagtatccaaattaataaaatcagaaatgaaaaggaagacctaacaatggaaaccatgaaaattcaaaaaaaatcatcagatcctactgcaaaagtttatattcaagtaaattggaaaatctgggtgaaatggaaaattttctagacacgtacaaggtgccaaaaaaaaccaagatcagataaaccatctaaacagtcctatagtccctaaagaaatagaaggagtcatcagtattctcccaaccaaaaaaagcccataaccaggtgggtttagtggagaattccatcagacctttaaaaaagacctaataccaatactcttcaaatgattccacaaaatagaaacagaatttacactacccaattcattctatgaaaactacaatgtttatacctacgccacacaaagacaaaacaaggaaagtaaacttcagaccaatttcgcttatgaatgttgatacaaaaatactcaaaaaaaaattcttgccaacccaatccaagaacacatcaaaatgatcattcaccatgatcaagtagacttcatcccacgatgcagggatagttcaatattcagaaatccatcaatttaatccactacataaacaaacccaaagaaagaaaacacatgatcgtttcattagatgctaaaaaagcttttgacacaattcagcatccattcatgttaaaagtcctagaaagatcaggaattcaaggctcatatgtaaacatagtaaaagcaatatagagcaaaccaatagccaacatcaaactaaatggagacaaatttgaagcaatccctctaaaatgatttactagacaaggctgcccactctctccctatctattcaacatagtacctgaagttctagctaggtcaattacacaacaaaaggaaatctaatggatacaaatttgaaaggaagaagtcaaaatatcactatttgcagaagatatgatagtatacttaaatgaccccaaaaattccaccagagaagttctaaagctgataaacaacttgaacaaagtggctggatataaaattaactcaaacaaatgagtagtcttcctctacacaaagtataaagaccaccagttgaaatagcaccatttgttaaaagtgacatcttttttccactggttggttttagttcctttgtcaaagatcaagagaccacatgtgtgtgggttcatttctgggtcttcacttctattccactgacagaaatcaggaaaatgacatccttcacaatagtcacaaataatattatataccttggtgtgactctaaccaagcaagtgaaaggtctgtatgacaaggacttcaagtctctgaaaaaagaaatcaaagaagatctcagaagatggaaatatctcacatgttcatgaatttgcaggattaatatagtaaaaatggctatcttgccaaaagcaatcttcagattgaatgcaatccccaccaaaattgcaattcatacagttaacttcatattatattctatattcatatattctaatgtcatagatttagaaagaaaaatttgcaaattcatttggaataacaaaaaaacaagatagtgaaaactattttcatcaataaagtaacttctgaggtaataagcatccctgacctcaagctgtattacagagcaatagtgataaaaacggcatggtattcttacaaagacaggcagggatatctgtggatatctgccttctcagaggcaaagggaagtgggtagagagggtgaagaactcaaagaagagggtctgggaaaggagggcaaaatttggtatgtaaataagtaaaatattttttttaaaaattaatttaaatttccttttaataaaaaggaaaaagagaaatacaatgaatagataggcacataatagatgatacaggtattcaagaagagactcattgtggaacttggtcatgtggtcatggaagctgagaaagacccctttagctttctacaaagtatagaaccaaaggtacatcccagtgagcccagagatctgaggacagagatgattgttagagtaactcttaaattggagctttaaaatgagcaacttcctctatatttcttcaagccctaatatgtttgagcctagactcctgctagctatgaacaggagagaacagatgtagcagccccagaagagggggcaagtgctcttattttatctgattgttccagggatttcatggaatcttctcacaggaatgaggatagatctaccccactaagtataaaaattaaaatgccagtctcacccagagatatccttacagacagaaccaaggacaatattttttcagctgtcttggtgtcctttatccaagtcagactgacacttgtaactagccaccatcttctcttaagtgatgccaaaactctaaaaggcagattttcattagctaacatgcaatttcatggtatctgaaatctaatcagtcctcaaatagaagaaagaaagaaagaaagaaagaaagaaagaaagaaagaaagaaagaaagaaagaaaggaaaaaagaaagagagagaaagagggagagagagagaaagagggagagaaagaaagagggagagagaaagaaagggagagagaaagaaagaaagagaaagagggagagagagagagaaagaaagaaaagagaaagaaagaaaggaaggaagaaagaaagaaagaaagaaagaaagaaagaaagagggagagagaaataatgaaagaaagaaagagagagagagaaagagggagagagagagagaaagaaagagaaaagaaagaaagaaagaaagaaagaaagaaagaaagaagaaagaaagaaagggagagagagaaagggagagagaaagaatgaaagagagaaagaaagaaaaagaaagaaagaagaaagaaagaaagaaggaagaaagaaagaaagaaagaaagaaagaaagaaagaaagaaagggaaagagagaaagagggagagagaaagaatgaaagagagaaagaaagaaaaagaaagaaagaagtaagaaagaaagaaagaaagaaagaaagaaagaaagaaagaaagaaagaaagaaagaaaaagaaagaaagaaagaaaaaaagaaagaaagaaagccaacaacttgtgatttgcaaggagagctgacatggcctagcaaactgaataagaggaaaggatgtatgttataaaggagccctgtgtgcccctgaaaggacatagagttcttccttacatgtctgagatttgtttaggttttctaaacatagtctattcttaacttttgctcctgtcacagcaattaacaaatttcttctgtgttgtgccacccagctttacacacaagtgttagggtctgttcctttattttccaaagatgaactccaaattgtaaaaatctttcaatgaagttctggcccattagacttgcaaactttatatgccccagtacaggggaacaccagggccaaaaagtgggggtgggtgggtgggagggtatgggagacttttgggatagcattggaaatgtaaatgaggaaaatacctaattaaaaaaaagaaagaaagaaagaagaaaggaaaaagaaaaatgaaaaagaaaaattgctttgggagcaaataaagatttctcaaagaagaagaagaaaaaaaaagttctgttttcaggcctaggggtgctcagtagctgtgtctggcattttctagaatgatataaagaaacatctgtttattctagacatggcacttatgacatcccaagcaaggagtccactcgagtctagctctagctcaatacttgcaggggtgtggctgaaaggccacttatagcaacatggatgtctcattagcagtgaagcattgaaaagcactgtccatccttcagacagcttagatgattccaaagttgtctctctccaaatgattattattggtgtaacatctgagagggaccttgtaaaaactggtggtttatgggactttatgagacatatgagttttgtttacttcttgagattcgtaaacttgccttctatatccaaaaaggaaattttaattcagtgttttctattcttgcactcaacctgctaagacatttcaaagggaggaaggaattttcctgctagtcttgggaatcactcaagtcccctgaggaccacattaaatccactatgtacagaacatgtgtaaaatagtttacttccagtgtataagagatcattgaatatattcatgtctgactacatacaagaagaaaatatattgcagataaatatataccagcacacaataattgtccaaaatgagagggaaaatccaagaaggctgtgatccaaccccaagcaataccagtataatgtgtactattgatgccaaaatattttttaaacataaaattaaaataaagtagaaataccacccttaatgctgctattatataaatcaagatccagcaaccacgctcaggagttgagaactaggtggttaatgtctcccttaactcctcaacgttgctttctcatcagtggaggggatatagcaaactgactttatttctttccttccatgtgccctccaacctccatctcatctcacacaagaaagttgaaaagcaagaaagaacactaatccctcctgaaaagacctggaaactgcactaagctgatgtcagtggccattaactcaatcagccaagctattctatgcaattatggcttaggaagcatctttgtgtgtcagatgtgatgcatttatggcaagaaaactgtgagttaggggattaattcagctgggttttcacaaacactgtcaacaggaaattcaagagctgaggggcaaagatcaaactgcccagatgtggcttagatcttgacgattaggggaagaatttaagttactctgattaaaacacaaatgaacatagagctctttgtatccgtaagaggaagaaaattcaaggctctccattcagtgaaacggagtttatcagtaataatctttaacattattacttgaaattttaagtcttcttcctcatatcttttttttgttttgttttctttttgtcttcttcctcccttaaatacatattttgaggtgtttacatttagaagttcagaacatacacctctgctgcaacaattgtttttgtttgtttggttggttggtttttgttgttgttgttttgttttgttttattttttgttttttgttttttgggttttttttttttttttggttttttgaaacagggtttctctgtatagccctggcagtcctggaactcactttgtagaccaggctggcctcaaactcagaaatttgcctgcctctgcctcctgagtactgggattaaaggcgtgtgtcaccacgcccagctgacaattttgattagatgaagagtttgattattttatatgaatatattgtagagttctaaaatctctttttggatacagaatacagacatacacacatgcacgcacacaaatatgcacatactaagcaaaacatattatgtgccacatacacaccagatacagaaaaaaaaatactagactatactacccctacacacatacacacaaaacacattcacacctacaacacatacacacacacacatacatacatatacttacaaacacactaaaactgcatacagacgacaccataccagaacacacacacacacacacacaaacacacacacacaaaatctttctctggcaatactaatcacccatgactagtactcgtccttagaagtggcttttcattttgtaccatttgactatgaagagatggaactggaacaaatttgtggatcagagtaaattgtaaattagtgtggacaccataatggtatgattgtttaatgaaaactctaggctcccatataatctgactgatgctgtgttttttctatttaatatgtttaaacaggtttagggctcgggatgtaggtcagttgttaaaggacttataacatgacaaaagtgtaatgtcattttccagtactgaataaatgaaatgtgttagtatgcctgtaattctagctcttaacatggagatagaatctataggatcagaaattctaagtcatgatcaataacacagacagattgaggatgccttgcactaaagatcttgtctcaaaaactgataaacaaaaaataatgatgtaagtcatgtttgtagaaattggccaacccatttcctcttttaccattcatctctcccaacttcatttttgtcagtactttcctatcttcatattcttgctgtcccaggttgtgcagacacttgtacaatgtcttccttttgtggcttcatattgcattctactgggaagtcctcacagtggaaacaagtgcatcttgagtagtgtggcttcaagagggacaatgtggtgggtcattgtggttcaccacattgtggttattagaagttcttaatgttgtggacagatgggaaaatagacatacatcagcatggaaatattctgaagagtaaagtagaacctatgtggtgacttgggtgtctctcctaactctctgaggatggaggggctttcacagcactaacctgcatacagccaggatctgcagttccaaggcagaatcctgatgtgtggtcttcaataaccactttacacatgaactcacttctgtagggatgagatctcagcatctagggacccacatgcaatgtctcagtacggtgcttgtgggtatctgggagaaaggaagcctgttacagatattgtggcctgaacaagagatagattcaaatatcacattcttacagtctcctgattggctgggtcaacagttttcatagtgattttgtttattccagtgtgggaaacacttttctagaatacttctgaaatgcctgccttttcaattcttacttctatattttattcacagtagatttaagtgactaaggagcttgtgagatattgaagttgaccaagattttaagaacacgaaaatgtgtgagaaactttagtgctatctctctctctctctctctctctctctctctctctctctctctctctctctctctcaatgaaatcagtatcctaaaatatttcttctgttttttctatttctcttcccccattccatttcctcactcttttcctcctttctgttcttttccctctgcctcctttccttcctttctatgttgctttgacatacaattttactctgcagcttaggttagtcttgaatttgtgacaatgctcctgcctctgcctctagagagccagtattacaggcctgaacagaatccccagagatgaactaaagatttaaacagtaatatcaacaagatttccattcaaatgactaagatttcacatctcttatttcatcccaaagatactgattaagtgaattatttttactgtatatgtcagaaatcaggaatagtgtcttactctgatgttaaattttctaaattgtttaacttatagacagaacttaataattataaataaaacaaataagtagtaaagaattcactaaaatctatcaaaagatcccctagcatgacctgtaggtgcccattagtacatacatgtactaaattaaaatgaagctaaacatcaagtcactatatgaagatagaccttctgcaagttcagaaatatcttattgtgacaaagaatacagtagtcagtaaccacataaatctactgagtattgtgactgaaaaatagctcatttggtaaggtgtttgctttgcaaacttaagcacatatatttatttcccagagcccacgttaaaaaaaacaacaagggctggtgagatggctcagtgggtaagagcacccgactgctcttccgaaggtccagagttcaaatcccagcaaccacatggtggctcacaaccatctgtaatgagatctgactccctcttctggtgtgtctgaagacagctacagtgtacttacatgtaataaataaataaatctttaaaaaaaaaaaacgagtatggtagaacatacatataatcccagaattggagaggtgaagacaggaaaattcctagggcttgctggctatcaaactatacaaatggtgagctacagaccaatgaaagaccctgatgcaaaggaaaaaacgtggacagcttcttagaaatgatttacaacattgtaatatttacctctgatctctctgatcttcataccggtatgaataaaactgtacctgtacacatacagagagagagagagagagagagagagagagagagcaaaatcaaagaagtccagtcattttaatttagcttgaatgtaggtatccagtatcatattgaaccatttataagtcttcaagcttttaaatgcatcagcactcaacataatctataaacgactggctgttttatgtgtgtacgaagcaattcttgatctggaaaagataccactgtgtggcattctcacttagaattaagatgcaaactgtcttagcctcaatgaattcctgtttgccacatcatttcatgagtaaccccaggcctgtgaaatagagagatgggtatttacaacatccaatgcccttgatagctccattttttcaagggtgaaaaaccttgctatggggttccatagtgagcacttaagtagactgtcctttggggtagtaaatttcatagtagaggtattaatgttgtatgcagacagcaggagaatatatctctgagagagttcaggcccacctacaaaaccaggtgttctttcttacagatttcagatgaaagaggaagattcccatgatgtggttgttctgtattccacagcacagtctgtagccaagctgttataccttcataggcagcatggagaagtgagggctgctgcattataggaaataaaccacacaattctgagcatgtggtagaagtgtgcaggagggtcacatctattaaaggtactcatttattaccatcatccttttgatgccccaaagtccagcagttgaaccctataaataccctgcaggaactgagactaaaattagaatcctggccaggcttctgatttcctggtacctggaggtgctgttaaagggttaaagactcagaaacagagccaagatatgttttcttcccaggtgctatgagaaaaaggctgctgtcaatggctgattactccctaaccccacttgacagaaactattcactgaaggtcatcacagtacagagctttggtgttcagctagctctcacagctttgctccctgtcagggaatattcagaggcaaagaatgccccagcagaaaagctccacatcatggcaacatcaaggtctttttctctttgctcagcaaggcctttgactctgcctatcctgatgcattccttaatcacttcctgtcagagtcagtcttcaaatcccccagcttattcccactatgctgtgatgactgtgggcaccccctgtgatggtagaaccgacctctcatttacacccagatgtagagttccatgagaaagggctgcctttcacacagtttctttaccttcaatagtctcctggtgtcatgcacgaatgaattacttgcactgaagtctttgtttcataattgatacccagaagaactgaagtaacaggacccccaaaatagtcttccaacattgcaccagtggctcgcatctcttgaatacaactgagtctgattcagacacaaagttgtcctccctctccaagaatctcctgttatgaattactttgcttttctttgcaaatttgtctcaatcagccccaccccaggtatgtatatgtatatatatatatatatatatatatatatatatatatatatattccctatatctgtatctctctctttttttctctcagtagatagatagatagatagatagatagatacatgtttcttatatctctctgtgtatgtgccacttatttgcagaagccagaataggtaatgggataccatgtacctagatttatagatagttgtgagcttgcctgataaaggtgctaggaacccaccttgattcctccagatgaatgttaattaagctatcattctaggcctatcctatagaattttattcttttttaaaaatcacattgaataattttgaagttgctgtttagttttcctcttgaaaatttttattccttaaactggaactttggtaaatgagtaacagtcacctgtagcatcctgtcatgctgtacgtgcctggtgtcactagaagtgtatatatgtttcatccaattatgttccagccgtaagagtttttgctcagcacagacccagtttcatatgggtgagagtgttctacaaagaagagcaggtgtcctgctaaatgttgcagatgcaggcacatatgagcataatgttattcctcttacatacatgatgcagtgtcatgttcatagaagagcctctcatgagggttaagtatgtgtatttatgtgtgtgtgtatgtcaaaagacaatctcgtgtaatttatagactctacccaccttactactactactactgctactgctgcttatcataataataatagtaattattattattattattattattattactattactattagtagtagtaacagcaacaacaataataggagacaggttttacaaaggcctgaaacttctgaaactcaccaagtaggcttgtcagtaagcctcagcctcagtgttctatttgtctcctccttcctaaaactaagatagcagctatgaaccattatgttctttatgttactatgggtgtttgggtttgaactctagatttatgtttgcaaggcaaatgatgtctctattgaatgagccagcttaccagccatgagttctctgtttactctttacagtgttttactcacttagtatatctgtctataaaataattttgtatactggcttactgggtcaccaagtgtgtcataactgaggttacagcttgtccttcctgctagctcccccttcatttgtgaaaaaatgtttgctcttcatagacttctgtgtgatgtgtggggagacatgggacttggaaacatgttaattataagatttattttatggttaaaaaagagtcaagacctgggttagtaggtaagtttttaaagtgcttattgtagaagcatagaggcttgtgttaggatgctcgacatcatgaaatagccagacctggttggcccagtaaagagagtctgcaactaggctcaagaacactaaatgaccttgcccacaagttatttcagatttgtaaataatgatgctaacagccaatatctgggcagaagatatattggtttagggttcctagattttgtgtcagaggaaaataactacaggcagaaaaaggtagagaaaggagaaagccaccatggcttaggtgagtcaaatgaccatgtgcattagcaaatacaaattaagagcagcccagacaaaacatggcaaaatatataatgggattattggctgggaaatagatacaacagcatagagggtagatatctgcccagttcttatgctgactaaggcttattgtaatttaaaagttgtgtgtatcttttatctagtaaataaagagaaaaaggtgaggtagaaacccgggattgaccttaatattcctacaacaaagcctgaatgtcagaaattactgcactgggaaggaggagaaaagttatgcgtggctattccttggcaagtatagctgaatcattttatcccaatgtttgagttcgccttctggtgctatgataaaacactggtaaagcaacttagcagaggaaaagttttctttggcttacacttacaagtcacttccatctttgagagtatttaatgcaggaactcaagcaggaacctggaggctgaaaacattgaacaccacactttgttggcttaattacaggcttctactttgttagcgtccttataaaacccaccatctcctgtcaaaggaagggagttgtccactgtggatctgggcctccaaatcgattaatagtcaagatcatccctacaggcttatctgagcaatctttcaattgatcagagcttagatggctctgggctatgttagggtgaagttaaataggacatcagggagagaccttgcctcaaaaccaaaatggagtgcaatacagatacacagtagacacttgactctgactttcagacacatttgcacaagaacccaaatcatatatgcagattcatacaagtacacacatggccatataaatgcgtcatcgatgcacaaaataaaaagaaataaaataaaataagccattgtgcttataacttattatgtgtgaaagtattggatgtcacatctgacttgttcagttggccttgtacagatggagactattttggaatgcctgctatttagtttccctgaaaagaaagtatgttcttttctctgtgttccattttcaatgtgggacatgcatcaattctcatttccatttttgaggaggaaaagaaaaacaggtagaatggaaagagttctgacttccccatgagttattctgtttcacaatcagaatcttctcagcctgcattcaagctgactatcagcaaggtggcatagaaggctgagagagaggcttgccaaggtaaaaagacgagttttttatttgttttattaaaagtttgattgtgctttatacgagtggtttgtacatgcttacgatttttagtcactgctaaaacctatggcataaacctgaaatcagaaaaatggagttaaagtctctagttacattctcaacactggtgctaggcctggtttgtttcctgatacatgggtaataaaatagcagtttgggaatagatcatcaggaagaggcacttgctgctaagctgaatgtcctaggtgcaatccacatggcctacatgacgaaaggatagaatcaactcccacagttgtcctctcacctacatgtggacaccatgggacactcctaccaacccacatgcacaaacatgcacatactaatacaataagtaatgttttcatgaaatgcaatgactgatttccctgaaaagctagagaaacactggagtgaatttgagttatggcttaggtgggaacaaggattatgagtgagagagggtgacttagcgtggttaggaacatagaactttgttgcaggattcagaatctcctgcttggtcacatataggttccatgaggttggataaactgactgacttcctggcattgggtctgaacacagttgggaaaaccaccactaatctaaccctgggagaagaactcggtactgaacctgacttctattttttgtactcagatctagacgcaccaaattttctgaaagaacaagaaaaaaatgaaaaaaaccctgaagttagctatacagtggggagcatactcatatattgctaaattggtaattagctaatatacacaaagcactggttagattcccaacattatgtaaaatcaggcaccatggcactaacctgtaatcccaacatcctgtagatgtaagccggggattcatagttcaatatcatccttagctacataaggaactttaggtcaccctggactccatgggatctggcctaaaagaaagaaaaaataatatcaacagcccagtatgcagttagtaatgcttatagggtgttagaaaccaaatcagacatagtcttaaaatcatccctggttttatgaaaaactgtcatttaattctggatgctgtacctatctaaggtgagatcttattttctcttttcatttgcaacttaaaagatggctcagcaggtaaagacatctacatccaaggctaattccctgattttaatccctcaggttcacattacagaagaagaaaaccaaatcccacaaaatgtttcctgatttttacatgcaggcattgacacacacacatgtccaaaggtggacagacaaacacacactgaataaatagataaatgaataaatgaataaatgtcatacatgcagatgtgcaaatacctatgtaatgtcagggactcaattaacataatacaagcaataaaccaaatctataaaatttgcatccacttactatcaagttttagtgttgctgaggtgacactgtttaaaatcactttgaatttttttaccttttaaaatcagtgaaatctctaaaatgagcatcaatagagattgcacatgatgaatgcttcaagaattagcttgaatttcctaggaaaataaaatctgcacctctttcagttctaaggagtaagcagagaggcaggagtagtagttgggacttttgagcatggtgagtagtagtgatagtagtaacagaaaatgtatatttcttgggctgatatctcaggagactcaacggcttcctcccatgactattaacctattgaatttgtttttctctattatttattgagaaatacatggatatatatatataatatgttttaatcaagcctacccattttccctcctctcctattcctcttctatggcctctactacttattcctcccatcttcatttgttttacattttctgtttttgtttctgttgtttttgtgggtggtggaggtgtttgggttcatgtgaaaacacttaatgaaatagtcccctctttgtgccacatggttctgaggatttgagtcaggtggccaggcttgggaacaaacctttttcacaatgagatgtctcctcaacctgagattccctggggatgagccacgtgacttcctcttacaagggaatctcagggagctgcatttctcttaactgtatctgaatcctggctgtctggatgtttaaactgttttgacctcttccttccactatgtcaagagatgtatgttacttctttcatagggcattgtgcagggagtcaaagcatactgaacacagtaaattccagtataaaatagctgagtcacaataagcattgattcttatcccaactctggatttgttcagtctaacaagtacatgggagggtccctccaagtaatggtgcagacacccaacatcttccccagtaattattccagcaccatctagaccttgtgtgctgtatgtgttataggaatatgaaaacaggggggaagacataaccaaaagtctacttatagctttattcttgagaacttggtcttgtaggtatagctggattactataaaaaaaatgaaaaaagaaaaaagaaaatcagtcatcccttcccccacacccccacatcacaaacacacacacacacacacacatacacacacacacacacaactcatactagaacaagagtggagagtatcagcataccattgggcctatcttgtttgtggcatactaactactaagaagaacacatttcaaagtagatgacaattatgggcctttcgccatcccagtttcaaatcttatttagttggtagaactgaaaagaatcttatcaaacaagataagatgatgctggaagacaatctctgcagcagaagccagaatgcagagtgtccctgagctattaagtcagatctgaatggagaccagaaatagaaagtacctgagctaccaagctgaggtctgagtaaattctctttcatttggtaggaggtaaactagagcatcaggagagtgtgcatgcaagtttaaggaaatggcaaaactattacgctatatttagaagcacttttccatccagatctcagcaaaggagccagcaagatggttgatttttaccacacacctgtccatctcaaaagacactgcaacatccctcagcccaagttccagagtacttgagcattaagcagtcattagaagtttatattgatttactttttccttacttaaggtggagacaaaacttaaggcataggttttccaattccaagaaaatgaatattgattatcttcaaagttcaaatttcatgattagtctaggagccaagcagctgttgcaaagcccttctgagtacagtgggttatatgtgagatgtgacagatgtcctcaagtactgcagctgcatatgtatcaattcctcttttgttcctagcacgtggatgattacagaactatctgcttcccacctttccaggcatggctaccctggactcaggtttcagctttactgtctctgtcttagaaaggcctttataaggcatataaaatttgcaagaccaaggggcctctcttcccagtgatgtccgactaggccatcttctgatacatatgcagctagagacatgagctctgggcggaaaaaaaaaaggcctttctaagcacctgctaagacattctgtctcctgtaccagcattgtaacttctgtctttctcttgtgaaggttcctcacaggctttctttgaacctttcatttcccttcaccaagcattctcctcatagagaataaagcttaaagtaatcaatgatgcccatggaatgcttaatgaaatccgtctttcagctctgcatccacactgagatatgagtccactagtaggttcattttacagatttggacagagaaaggaaaaaaatggagctaaagagagatgattattagaaggaaagaaagaggaatgaagttggctccaataaacactgacctttccctggaccaggtgccctgggatataagttagaaaattggttctgaaactaggagcttaatttcagaaacaaaaactgtgccataattgaacatagtttcattgatctttggcatatgaaatggtgacttcctaaggcattattacaagtctttctttcattatattccaggaactggtggttggtctccagaaaattccagtgcccatcagtggctgcagttggacctgggaaacagagtagagattacagcagtggccacacagggaagatatgggagctctgactgggtgacaagctattgcctgatattcagcgacacagggcacaactggcaacagtacaagcaaggagacagcatctgggtaggaaatacttccttttcaagtgaataaagataagatatgctaatgctaaccagtgagagtctctgccatctcactgtaaccagactgtgtagcctaataactgtactgtatctattcagaaataatgagatcacatctaggccctggttcaagtgtagttctatttcaagggaaattggactaccagctgtagagagattggtgtgttacttcctttattgaaatttcaatgtttttaaacacagaatcttctatgccaactataaaaataggaaaacatggtaataaaatatgattgtcagtaagattgtgtcattggctatcttactttcttatgttcagtgtctgaggtaaaattctgccaagaaaagtcacataactgtgaaatggctcattttggcttaatgttcaagtttacattccatcttggcagggaattcacagttgttggagattaaagtggctggtcacatgacatcaataatcagaaggagcagtgaatgttgttaggtcagtgctcaactcactttcttcactattatctagttcaggatcttagccagggaatgctgctgcccagtgctggcaagtgttcccatgtaaataagcacaaacaagaaagttcgctacagacatgctcagaggctcatctctcaactgattttagattttgtcaaattgacattcaccatcatattggctgaggatatgtctgcatatatatcagacacttttcataacttgtctaaataactcaactatgtcacttgtccaacattgctatttgtaggattacatctgaggaatctgtactctattctgagtatgctgaacagtcagccaccactcacagttctaaaaacattcaaatatatatgacaatgtttagatttagcccagggttgagggggaaaggtggggataacccctgttgggtcctgagaggaggagagtccttggcttgtccagagggtggcttagattggtggaggccatagctgggagcctgagaggccttctgcgagagattagtggctgactctttagaagaaggcctgttccattgctcctcatggtggatcctgatgaaaagagacagtctatggttttaaggaatttattgtcatggtggagagtagcaatgagtaaaaccatacaccactttctcaagaagggcctggggttaaatatcttttgcaaggaggagtgcctgggaagggagtttattggctaaacctccaggcctttaggtacctcattaaaatgaagatctgtcttgagactacatgacctgtggtcatgtcctctacctatggaggggcttccggcattgcccttacttgattgatagccacaaaattatggaggactgtggcctcctatcaagagcctgttgccaatctgtttttctttcttaagtgaaaatttgcagtgatgtttcagggtattgcctgctttgagtatagcctcttcagtaagctagtgcttttctacatttacctgtgtacacacatggtgcttaataacattccttcgacatggagtcagcatatagacttcagtattaatactcatggacactgtgtgtaaacaagcagataattgtagtcactaccatgcttgcattggcagttggatataatccagcagttgatatcaaatgatcaggatgatctgtttaaaatgaatgttagacctagtagggaaacccccacccaattcccaattcagcatgcacccaaaaaaatcacgaaggaccatctcttgatgtaattacgtgaggacatttaatgacggagctctggaccgacatgcatcccacacaggagataacagatatcggccacgaggctcgaaagctaagggtttttatgaggtaaggggattatgggtgtagaattcagggtgtaatgttattcaaacattaacacaaagattacatgttaacaaaagggcatcaggactttgttcctgtaggttgggggcttatcttgttcgcatagcatccagttgatgtatgactttacccggagtcaaggggcagtagacagaggggaggttccggccaggtggtgttgacccagacaagatagccctgcttgtacaatcaagcttttcttaggaatgtcttaacaacagccctgtcctgctttgttctcggccccaggctgtggctcatagacaactcttttacatgaatcacaagatacaaaatctcattttctttcatgaactcttctaaatccactgctataaaatggatcttgtcacagtactctaagatttttaggaagttcaactcataatggtatgcttaatatatataaaccaaatatgttctgaacactttctctttagaagtcagagttaatatttcaattttaacactttttgcctctttaaaattactgtatcacgtgaagtattatagtgtctgcaaaagtgagagttatttctaattgcctcttctttactgagatatgtgtttgtgtgtttgtgtctgtgtgtgtaatgatgtgcatgcacatgtgtgtgattgcatttggagccctgacctaacatgtgtctgtcctctatgcatttttgaagtcaggttttctcagtagcctggctcccttgaatttggctctgctggttaacccgcagatcctaggaatccacttgtctctacctgtccaatgcttggattataaaggtacacccaaaaccccaaattttctcttggttcagatccttattttgcatatcaagcactttaccaaccaagaaatctcagtactgagaatttactactatatatgcagcaatttctgtttcatctttaagctgttgctttctctatatattttgtctctgttttggagtttaaaataatctgtggctctgatcagtaaatccctaggaagcttaacttcctctcttgaagagcaagtgtaatgaggatcctgacctcatatgacctgtaaaagggattttcaaaaatgagcatgtttcaaaatagccccacagggcttgttaaggtgcagtgtactgagctctgcttggagaatatccaagccagtatgtcagagtaggtttaagaatttacatttctaaaaaagtatcaggtaatttcgggggcatctggtccagcccttgctttgtgaagctctgtgtaagtgtaaaccataagtaattgactcatgcatgtgatgagcattgaccagagctaaagtggtgagagccatgactactgcttttaaagccagtgcgtggcaaacacttagagaagatacccagtgtacacaggctgtcagcttctgtgttttgagctttgaatacaaaagaaagaacaatatttcagtgctttttgagtaaactgaaaactcagtgggacaggtaagctctccttaggttatgggctatttcccagacaggctcattaagaacaattggctcagaggcctttcagcagacaaagaggcgctatagctgaacctaggggagttgctgacgcctaaagaaaagaactctaggccaaaatctgaagccccaggtgtctacatgccctgcagtcaaatggaaagcatccagacctggaagggttcctggaaacaaaagactccctctggcttaaaaacaaagaaaagaagctcaaaggaaattcatctcaataagattattaagcccattatcacaatagcagtcagtgccaaggagagaatgtgacataagaaccagaaagcaaaatctgttaaggagggctatattgttgttggctcagtgtgaaatgcgagcaagagggataatggaaaattgatggatgcagggtttaataaatgacccaccccacaagataaatgtgaagtagtgctggagttgatttgtttcatgattgttgatttgttttctatgcctggttacagttattcatatggggaaaatatttctctatgtctgagagtatcaaaatactttaaatactgttctgaactacaggaaaataccaaatggacccacaatatgtgtttaacatctcccatttccattgaaaatagttctttcattttgtaacccgagaatgtatcagaaacttagctacagtctacagatgaaggtaatagcgatttttttccttcaaagttatctcagaaaagagatccccaaagatgaagagaatgcgcattagttaagatctcagagacctgagttcagttcagttttcctcatcaatgtatggtaggtcacaaccacctataagtctaattctagtagatccaatattcatggccttcacctcattcatttacacacacacacacacacacacacacacacacacacacagaaaaacaaacacacacacacacacacacacacacacacacacacacacacacacacacctacaaacaaaacatgactaccacaaaaaatttaaaaacaagggtcctttagagctatgcgggagttttcaaagaatcctgggtctctcatttcctgtcttgtttgagtatattttagtatatcaagcatgtctgacactatagattaagttggttttaaaagtaagacgtgtcagtcttctgtaagagacagataaatgtaaagaaggacactgtaaagctctatgtgaggctggggagatatgtgtttcaggcttgtcagtagatcaagttgtatggtaccttttccctagaagcgattttgactttataaatatttggctacatttttgtgtcatctttcttttttatgacaagctgcaatgatagatgtccagacttctattaaaagagtgataaactgagtatctataagggacaaggacttagccggataagcatctttgctgactgaggatctgcttgagatggacatagaaatattgagtgcataatctcctggccatggacttactctaaggtagctgcttctgtgatgtgctgctgtttcagacattgtgtctatgtgaatgctgtatgttaaagagaacagaaggtatacacataaggctcacatggctacattacataaaaaggtaacttgctgcattagcattaagatctgagttcaaataccaggtgtggttccacacatttgtaaacccagagctgtgcaggactgagattgaaagaccgatgaacattctggctgccaggtagctcaaggaccagtcagagaccctgtatcaagagaataagtcaaagactgtcagagcagagtaccttctgtctttctctggactctgctcatatgcacaagatacatgtacccacacatacatgtgcacacacactcccaaatcaagaaacaaagatgtttgcacatgcacagaagaaatgcatatagtgtataagaaagataacccaagccaccttagtgaagagataacagggaatctgtgcttgacaaaaaactccacttagaggttagatctgggtgtcccttccattgagatagctttccccacacctgcaaacactaagactgtattgctaatgtggttggacacatgcaagtgactgtacttccagggattcctgagtgatcactagctactctgccaagcaaatgtagtgctgcttctctcccagaccagaaaaggcttgatctaggagccccagtgctcttgtattttgcttctctttccctgctgggtatctagttacagttccggcatattctttatgcacctccttcatcacactaatatgtcatcctgtcagtgttctcctttgagacagatttgtcacttaataacttctgaaacaattagatgacaattcagtaagtggatttgtcagttctgtgtaatgaaaaagaaaaattattttgtaagaacatgcaaaatcttcaagtaacattgtagagattttaaaaatagagtcagaaaactcaaaatttgaagttttttttaaatttttgtaaacttcttgaggatgtttataaaaccattccttcaggaacctgaagtcttccagagagctatatttaaatatacagatgtaagtgaaaaaaatattattctttagaatgtgaccctagtatttaaacaagagttgggaaattttctcaaaacacacacacacacacacacacacacacacacacgtatacgtatacgtatacgtatatcacttcctcccatgagaaatcttcccaattgtcaatcattccaatactcagtctttccaacttgcaatttttttaaacagcactattagctaggatccaagggttcaatcatatgatcctttagaagatatttcatatttaaactgtgacagatgggttggagagatgggtcagagcttaagagcactgactgcttttctaataataatttctgaaacaattagataagtctcctgttcaattcccagaaaatacatggtggctcataaccatctataattagatctggtgctctcttctggtatgcaggaatacatacaggcagaattctgtgtgtgtgtgtgttctgaaaaatagctacaacactcaataaaagacatgaaaagtgcctgaattaattctttttcagatgtaacatatgctaataagtttgtttcctggctggtctatcaatgaaccacagacactacttgacagtttcaagcctttacattttagtgcctttaactgtggaagcttttctgtgtgctggtgcagggaagtaggcagggcagaggacaacttaactagaacttcttgggtgttgtctgtcttaattattttgagacaagacctctcattagcctggtgctcattaagctagactaacttgaaaataagccctagaaatctgcctttcaaagcatgtaccactaatatcttgattttgcaaaacagattctgtggattgaattcaggtccttatgcctataaggaaagaatttatcaactgaactattactgcgcatacaagtaggttttgtttatttggttttgattggccattttcccctctcgatttcttctgttcaagccatttagaaggaagtatattagcaatatgtatgtagtaggtatcttcccctgagtgacatttgtactcttctaaactcatctcaaagtacaggagagataggtggtccacatgtagagatgaaccattaaggagtatggctgtagctcagttgtagttgagagaaagctaggtttcttccatgacagacttcaaattggcagttaaggagagtagacctaaatactgggcaagtttaggcaatcctaggcaagtcaattattaatagaataaaccccagaatccagccttcacacccagataatagacagccctagtcagttggtttgaagcaaggacaataggtcagcagcagattccagatgtccttagctacttccttggcaacagttcctagacatctccagcaagttcctggccaccacaccccaataatagaatgcccatatatggaccaaacagattaacatagaggccaccttccccagaattcctttgactgctttccagtgaacttgttttgcaatttgactcattggttagataaattataaataaaatataaaataaaaatatttcttatctctcaagttggccttgcagttgctctatggtcaaggatcacattgaaattctgatcttatcttcaagaatgttagtattttagtcatgtaccataaggctaagcttgtacagtgatggggttacattcagcattgagtacatgctactacactatatagtagcatgtatagtatagtactatcataccagtacactgagctactcgaggtctgctgatagaaattctctagattcctctcagaaaatgaacacactatctaggaggaatctctataagaaactacaatgttactgttactcatggtgagaggattgagacagtctgacttcataacaggcttcaaactgactgttcaggaggctaggtctagatctcagtttcccaaaactggtcaagtccaaactagtcatttactgaaaaaaaaaaaaaaaaaaaaaaaaaagaagaagaagaaaagaaaagaaaaatccaggcctcacactgtcaataagaatctgagataagggcaaagaatcaaaaagttttcaggcttccctagcaacagtttctagcctcccatccctagcaatggttctggaatgttcttagagattgaacaaactaattaagataaaggtcacctaaccttcacaggaattcccctaatgtgttttaaattaggccttcgaccttgcatggatgtctacatatggtagatccccaaaatgctggaattcagtagaataaaagactttttgcttttgcatactatttgagactgggacatcattcttcagcaaatcatggacactaacaagggaacatcaggcacatagcctagatatcagagtccctaaatggggaaggagaactcaaggaattaccagattctggaccagggagatactggctcaagaaagatctcgggattatgaagactggaaacaaatctcttcagacaggcagaaaaaaaaatctcttacatgggtattgaaattaggcatctaataccgaatggcagagaagcacctgaaaaaatgttcaacatccttaatcatcagggaaatgcaaatcaaaacaacactgagattccacttcactccagtcagaatggctaagatcaaaaactcaggtgacagcagatgctggcgaggatgtggagaaaggggaacactcctccattgttggtgggattgcaagcttgtacaaccactcttggaaatcagtctggcgtttcctcagaaaatttgacatagtactaccagaggatcccgcaatacctctcctgggcatatatccagaagatgtcccaaccagtaagaagaacacatgctccactatgttcatagaagccttatttataatagccagaagctggaaagaacccagatgcccctcaacagaggaatggatacagaaaatgtggtacatttacacaatggaatactactcagctataaaaaaaatgaatttatgaaattcctaggcaaatggatggacctggagggcatcatcctgagtgaagtaacctaatcacaaaggaactcgcacaatatgtactcactgataagtggatattagcccagaaacttaggatacccaagatataagatacaagttgccaaacacatgaaattcaagaagaacgaagacaaagtgtggacactttaccctttcttagaaatgggaacaaaacacccatagaaggagttacagagacaaaatttggagttgtgacgaaaggatggaccatctagtgattgccatatgcagggatccatcccataatcagcttccaaatgctgacaccattgcatacactagcaagattttgctgaaaggacccagatatagctctctcttgtgagactatgccggggcctagcaaacacagaagtggatgatcacagtcagctattggatgggtcacatggcccctaatggaggagctagagaaattacccaaggagctaaagggaacttcaaccctataggtggaacaacaatatgaactaaccagtacccgggagctcttgtctttagctgcatatgtatcaaaagatggcctagtcggccatcactgcaaagagaggcccattggacttgcaaactttatatgccccagtacaggggaactccagggccaaaaaggggcagtgggtgggtaggggataggggggggtgggtatggaggacctttgggatagcattgaaaatgtaaacgaggaaaatacctaataaaaaaaaagaaagaaattaggcatctatattctgttgttgactttgtcctgtattggcatattttcaagcccactttaagcctttcaggttgaatattgacaaatacacagcagtcttgcaatgaatgttggctgtaaaaattgaatcatatgtcatttttctgtttgcttggaatccctagcttgccatgcttcctcccacacatgacccagcaaatttaatttcctccctcttcctccaaccccacacactctgaaagcctcaggagcagaaaatgtaccaaaaaggcccagtccagcagttctaacattccagagtggtgtcccaatccccctcaccttaagtcacactgcccctgctccgcaatctataagaggcttccacaaagtagtctgattaccattaattctaatatcatcccctgagactggtgaacttacccagtagcctgttctcaagtaaacctgcctttttcttttaatttgtctgtgctagctcatttcttcagaagagaaaacctatcatttcactaaagagcagataaatattatgattaatcacagaattaactagtgagaaatatatttacttgccattgactgcctaggagttaacaataatgtcatcagttggaggcatttccccaactgaagctcctttctctgtgataactccagctgtgtcaagttgacacaaaactagccagtacaattgatcccttgtcaacttgagacacaaacacatcactagtaagcctcaacccttgcattcttattcatccccaagatctaaataactttagaagaccaacagtttttacatattaaaagttaaatcctttcaaaatatccaatatattttaaaatccaaagtctttttacaattaaaagcctcttaactgtgggatccactaaaatactttcttccttcaagagggaataatatctgggcacagttacaatcaaaagcaaaatttaaattccaactgtccaatgtctgggatccaactcacgatcttctgggctcctccaagggcttgggtcacttctccagctctgccctttgtagcacacaccttgtcttctaggctccagctgcctgtactccactcctgctgctgttcttggtggtcatctcatggtactggcatctccaaaacactgcatgacccctttagtccctggctgtccattgcaactgaggctgcaccttcaacaatggccttccatggccactcacagtgccaagcctcagctgctctgcatgaccccttcatgcctttaaaatcagtaccacctgggtgacccttacacattaccaagtccagccacagcacaaagtacaactttggctatctctggaacacagcctctgtgctctcagaaaacacatcccagaagatgtcacctcaatgatgctggtctctccttaatcactgataatttcttagctccagctaaccagcatcaatagtcccggtaatgccaaggttttgctttagtagttctggtatcttgttaatcacagctgattcttcagccccagctaaccagaaccacagaatcttcacagtccaaaataacaatggccctgaatagagtctttacttttacctctgaaatttcacaagccaggcctccatcttctgcactgttttcaacattatcttccaatctcctatacaatgtctgagagagcacttaacgcttaatggatcttctatcccaaagttccaaagtccttccacagtcctccacaaaacatggttaggttgtcacaggaataccctactatgctggtaccaatttgccttatccagggtttctattcctgcacaagcatcatgaccaagaagcaagttgaggaggaaagggtttattcggcttacacttccatactgattttcatcaccaaggtagtcaggactggaactcaagcaggtcagaaagcaggagctgatgtagaagccatggagggatgttctttattggcttgcttcccctggcttgctcagcctactctcttatagaatccaagactaccagtgcagagatgtttccacccacaaggggactttcccccttgatcactaatcaagaaaatactttacagttggatctcatggaggcatttcctcaactgaagctcctttctctgtgatatctccagctgtgtcaagttgacacaaaattagccagtacaattaccttgtgtgcatattgtgatgaacttacgtttttccccacaaactcattagcacccagactctcaaaataatacctttttgaaaacagcttgtttgctgatgtatctactcttcatgtaaactgtttctaaaattagaagagcctctaaattagttgactagtgtctttatcagtctagaggttgggctgggaggtgctgtgtaggtgagtatttgaattctgagttccatccttagaacacaagtacatgaggctttctttagtgatgtgcacttgtaatcccagtgatggtgatacagaaacagatggatctctccaaagcactgttagcccaggttagcctaaacagcaaattcctgacaaaagaagacgtgagactaggccagtgcctggcaaatacagaagtagatgctcacagttatctgtcctatggaacacagggctcccaatggaggagctagagaaagtacctaaggagctgaaggggtctgcaactctatagatggaacaagaatatgaactaaccagtacccccagagttcatgtctctagctgcatatgtagcagaagatggcctagttggccatcattgggaagagaggccccttggtattgcaaactttatatgccccagcacaggggaatgccaaggccaagaagtgggagtgggtgaatatggcagcagggtggggggaggctataggggacttttgggacagcatttgaaatgtaaatgaagaaaatatctaataaaaaattgaaaaaaaaagaaatttctacctggattctaagtcatatcagagggagatcattctttcttctgggcaatgtaaaaactgaaaaggatggagggctatgtactgactttttcaagtctcagattttacagaaaaatccaaggagaaaaagaaagagcaaatcattggaatccaaatacacccttcacctttcattttttaacaaccttgttagaaagagaatgcatgccagatacacacagacacacacagacacacacacatacacagaaaaaaaaaagaagatactttgtctcaacaaacaatgtcaaggtagacagcaaaagaattgcagccaactttaatctcttgcctccacacatcctgctgtatttatatttacctacaagaggatagaaaaaatgtatatggagtgagtcatagacaaaatgtggctgcagctggtctgatacatttggaggcaatcaaagctgggaggaaactaggtaaaatactcccttagaatattcagacaacatatagtcagtcctataaatatcagttgaatttgtgaatttctgatctccataataatgacatattcttggttttattaataacctagatactgagaagttgtcaaagcaaactaatctaatctacgtttgtaccgactgttttttgctttacacctcatttaacttggactcctacagaagacaagtcactaaacactggccagcaagtcctgtctacatggcaaagcaatgtcaattaaaactgctcaagaacagcaattgttccttggtctccacacacacagcacatatgcatgcattaggttaaacactaacttgcccaactcaagaacattacaggtccttctccaccctcaaaagagctctagctcatggtaacaccatctatagaactcaggattcgctcctatgtgcttcttgacactcatctctattgctggaacctttttatagacctgattcaaatgcattcagccatacttgttctgattaagatggggctcaagtttttaaaatggacacatgttatgcatagctactcctggtaaaaatgttttcacacctatcactgattcatttttgtttgagatttagtctttcctgccctgtagtctgagatgttgtagaattctgtgaagtcccttcctagaagacaagctagcactagaattccaaccatttgcctataccaacaagaagtttcaggagaaatttcaattatttggactccatcatttcaatagtctgatagacttagaaaaggcacaatgactctagaatatcctcattccttccaagataacataagatgactcttctaacccatcactggtatcccttaaacactgaagtattccttaagaatttttagtcaggggcatgaaaccttaatttttgggaaagataaattttacttaaagactataataaacacctttttataaaaaaaaacactttttttctggaacccataaagttccaggaaaacacaaccatttccctgactcttaggcacaaaagcacacttataataaagtgtcctttattaaaactcccatagtgtatgtcattggtctatggaatatcttaagtaagaatgatgtcttttcagtgtagctcatcgatgcttgtcatcttctgtatctattaaagtatgagtgaatggcaaagcctttctgcacattgtgatcattgtggtcctggctttctcattcatttcattaatggactcaccattccttgagcttattgggttaaactgccacttgaccatcatccctccacccttaatcaattggcataaattattgaaaccaagaaattttcactgaacaagactcttccgagggtctcgggaaagtattgtgggaggcaagaacaacacacctgaataagatgattgcattcaggaagagagaaagacctactggcaaggttttgtgttgcaccctatgcaactagctcatggaaaaggaagcattacaggacactggtatctgttcagggtgtgtggccactctggctgctctaggtggtagctggctggtctaggagcccagtattttgtcttctggttccatagccccagctagactacacacaattaaggagcattcacctttacatgtgtagcatgagaattataaaaaagagttgtttctttgtgtgatgttctggctcaatgtcacaatgagacaaagagccaaacttcagctttttgttatatagccagttttctggccactcacaagacatagatgatatatatatatatccatactctgggcctcaatcaagttcccagcattcgtagctgtataattttgagcaacctccttaatttcacctataaaagtcagggtttcctaactgaaagaattgataacagcttatagatggattccttgttgccataagactaaaagacagaataacagaatatagtgttaacaaaacttattggcaattcaataatagaacattggtagtactcaagagaccatcaacttcaacaggggtaaaatttctttggtgggtttatggtatcctctttcctgacgtccccttcctatcttcattggtctgaaagtatctatgtaccccttctacatcagggaatatgtctctgtcttcattgacaagcatgaaataactgactcgttggttggctggagtaagaatgaggtcccaacttcctcttctctttgtgatatatcagacacagagacacacaggatgtgcaggacttgcttcagaaagatggaagcttaagtctggggagcaaaatgacacaaagaaattgtgactcactgactattgctagggcaaagaaccatgacaaccttaaactgagattattaaattccattttatcccaatgtacagccaatctagagcctccaagggaatatgtattgcatgaagatttattacattgctttcaatgttggctgttggatagtccaacattagctgttttataccagaaagactgagaactgaataaatgcttagtcttcaaggctggatatctcagaaatctcagtctggtgttgaaagcctggatctctgggcgaagttaaatttccccttattaaaaaaaaaaaaaaaaaaaaaaaaaaaaaaaggtttggcagccccttagaatgatttatgcatggcactctggtgcataaaatctcattttcttcagtgcatttgacaagaactttccaggcatgtgcctcctgtaggacaaattgctgtccttttttttttttttttaaagatttatttttttatttctatgagtacactgtagctgtcttcagacacaccaggagagggcaaaggatcccattacagatggttgtgagccaccatgtggttgctgggaattgaactcaggacctctggaagagcagtcagtgctcttaaccgctgagccatctctccagtgacaccttagtggaaaaggacaattctgtttgaaagtttctcttgacacacattggtcctcttgtctttgactgatgttctgctcttcttcctttaactcctgcactgtgaagtttatatccagtcttaccctcctgtatattaatacctgagttttcatggccagatgaagtgaagccataaaagtcagactctatagccaattaggtttgcatctgataaacttggctttgtcttttgtgtactatcccctggacaatgaagagattgcaccttgttcctttttacaaaacaccccacacacacaccatagaatagaaattgcttgcatgtttgctggcttaagcataatattgatttattacaccaaagataggtcagggattttttttaacatgcgtgcaatgctttaaaattatttgttgtcctcatcattaggaagcaggcattatctgatctctctctctctctctctctctctctctctctctctctctctctttctctctctgcagtgttttatgatgaggctctattttaagattcataattttaaagcatcttctgcttctgcatggaagatgcatgcagcatggggaagaatgagggctgactaatgttaattggccatctgtattagctaaggtcctctagaggagcaatacttaaagattgaatacctagcacacagggaattcattggattgccttacttgataacagcagtgtaatttaccaatgaccataagcaggctggagaggttgagtaccaaatatctgctcagtctgcaaggctggatggtgcagcgttcctagtctgctgctggggaaccaagaagactcctggagtatcactggtcctcagaaaaaagctacagaagtcatactcttctgtaagtggagcagggcaacagtttccataacatgaaatggctttacttgcctgcagaccatgaagctacagaggcagaagctgccactttcctctaccatatatttttgtttctccaaagttgctgcatactctgggaaaaggacttgcctcctcagttagtccttccaggatgcacctttacacactcacccagaggtatatctcttagctgctagtcaagatgaaccacaacattatcccagaagcatattcagaaaggggcaaaactgagtcctgaacaaagtggacacttcatagagtttttagaaaaagactgactggaatttataatacggacatttaaaatcttgaacagctaaatcttcatgtttggggccatggttattaattcccactataaaagtaactctccatatagactagaaatcaagttaacagtcttctgtgaccaacaaccccatgaatgaatgcagaattattaaagttgtagggatcttggagacatatcccttctatttgtatgctacttaattgtaaggtataaatatacacgttgtacaagatggccacatatgtcagatgttaggggttcagcttctatttctattatcaatttcaattaaattagagaaaagaattctgatacagaaataaataaagtttatgacaatttttttctaggaaaaatacttgaattttttatacagcatgaatatcctgggagaaatttttattactctaatatacatctttggataaatataagatgttctgtatataagaaaacagcttggcagaatttgagagtgaatgtttctatcaagcaaactgttttcatgaagaaaatgcagaaagtctttgagcaaagacaaaacagcatagccttgtttctcatactttaaaatatgtggcttgaagagctgaaaattctctcctggggatgtgtgcttgatgcacatggagggagaggcatggagcatgaatactaatctgccatctgtgtgaaaatcaggtcttcagagcagggtttgagcagtttaaaacacactgaaaaggagaaagtcctgagcattcatggaggacgttgggatgtgactgccatatatgactaagctctctgtctttagacagatatatactggcaaaatcagaaacatgatggtgctttgtaaccatccccactgtgtttggtttgaaatattaagaaaatgactcttattcagaagaatataaaactgtctacatagctgggaagttcgctcaggaggtaagggcatgttgcacatgagtatgagtccaaatcccagaactcacatatggatatggccacacagagcagttgtgggtggaaacactaggatggcaagtttgtgctcactgccaggtcagtcccagattctgtgagagaatcagtgtcaataaaataaggtatagaatgacagaacagaatacttcacatgcttcactgacctccgcgtacacatgtgcaatagggacacaacacacacacacacacacacacacacacacacacacacacacacacacattaaaatattcattcccttgttcgcctttcttattgtgctcacttctgccaatcaccttttatgtgtcaaatggtcccatgaagactttcatgtcttttattttaagagagtgactcaatatgcatcatgagagttacttataggagcatggattaggcattataacaggaacatgagagccttgccagggactatttcattcaagaaaatgtcttttactccccttcaactattaactgccagtagttcctaagagggagtgtggccaggtttgcttttcttctgtgaaaggatattgggggctagatatttcataaattttgtgcaggtaatcacagctgccatgagttgaaaatgcaatggccatatttattctatatgttggtgtcacacatactccccaccttcctcttacatccttaacacataggggatatattggaagaagtatacagaatcatcataattatttaactcaactactgtgaggattattattattattattattattattattattatcattattatcatcttttctaccctctgagacctacaagctctatggatagaaagcttgtaaactttatgactgaccttttttattgctactgatacagattctatggaattaagtgcaagaaatggctgttgatcagtgtgtttgtgtatgtctaagtatgtgtgtatatatttccatgtatatgttcacatcagtgtgaggatctatgtacatatgtgcatgtgtgcgtgcatgtgtgtgtgtgagagtgcatgcatgtgaatatgtaggtcactagtccactcaggtacccttccatccatctggtttagtgagacctcaccagggacatatcaaggaggctgactagtgagctccagagataggcttatctcaactttcctatggtaagattcaaataatccaccatataaccttttttttttttttccaagagcctgaggatcaaactcaggtcttcatgcaaatgtgagaagcaccttgttgactgaactatcaccccaccctcaaattcccttgtattactatcttcattttgtagatgtgattgtaaagatgtatttgacagatactaagaactacacccctgtggacatagggtggtcacattctcccagcaacatggggcctggtcattttcacaattatattgactctaagtggctataacataaagtttgtgaatgattttaccacgaacatttgagatggtaggtatatcaagtagtcccaattgatgtttacataatccatacacgtgtctagttaccacagtattgtaagtagctggctatcacatgcctcataaagtgatgacattaatggggcaatagagatggctttcacatagcccatgaaactggccatgatagtacgcatttctaattccaggggtgggaggtaatgacaagcagatgccttgagctcattggtagtcagtgagctccatattcaataaaagagtatcgctgtgaagagatcatgaccaagacaactcataaaatggacaacaattaatgagggctagcttacaagttcagagttcagtcccttatcatcaaggcaaaaagcatggccgtgtccaggaagacatggtgctggagaaattactgagaattcaacatcttgttctgaaaacaagcaggagaatactggcttccaggcagcgaatgaggatggcctcaaatcccaccctcacaatggcacacattctccaacaaagtcacatctaatagtgccacttccttggctaaacatatttaaatgaccacagagatcatttcacaaaaaatgaagtggagagcagtcagtgaacaaggatgcacctgctgctgaccttcagcttccaaatataatttacaccacacacacacacacacacacacacacacacacacacacacacacacactcacacatacatacaaaacacagcacatacacatgaaagatgaaattataaatgaagttctatgtatgtagcaattgtaaattatattttaaaaactgaaataacaattttggaatttccttccttgcacacaagtatgctttcataccacagaagttcaagtcccaatcagagcatgttctatttgtgaagcaacactgtacttaaaatacctgactcacatttccaactaccccacctgtttctcctgcatttatcctgcaggtacccatgatgcttatcgtcttcaggcctagcattcttatattctctagcatctctgaaaatcactttcagttgagggaaggcagaaggagtaattgttggacacccagataagtagtcttatcacctgtcaaaccccaaatagtaggaagtgaaagagatgatcaagaaaaagagtacatagcaaatttgcttggaatctgaagagctagaagagaggcctactatcagcaaaaaatggctaaaggaaatgaaatgctaataaagactttgaatttgaaacttgctgcctcatccagtgtttctggcaaaatttctagtattttaagtgaaaaactaagaaaaattaaatcactatagtagatacctggtctgttgagtaatatttccaaaataaaaaatttctagagaagtgctacaaagtcatttgggtctcatgttgccatcaagaaggccactgtatacttagcctgccttctttctttgtgatatacctgaattgtgaatttggagtatcctggtccatttatctgctagttgagcttacgataagacatgcagggctcacagtgaatgataggagctttgggcttcttcctctgctcagtcaacaggaaccagaggccaagataagcacctgtgagagggatttttcttgctcgtcctctgaatgcagaatgtgataaaagagggaggtctctgtacactgacccagaaagcaaatgcaagttgaataaaacagtgctgtggctgccagaagatgagatggtcacaaaattgaacctggctggaggttatctgtttattccaggcacaattcaagctgacaacatagacaggaacagaaataaaaatattgtttaaaatacagatgacaagaaaaggtctcatttcatagtttgctttatttagcacctcaaaagtgcaagtcagagagaggttagaacatggaaagtattggatcccactgaaaatccagatgtgtgtgtgtatgtgtgtgtgtgtgtgtgtgtgtatgtgtaatatgtgtatatttgtatacacacaggcacttaggtgtggttgatgttgagtgcatacatataggggtgattgtatgtgcacacatctgtgtgtgtttatgtgtgtgggtgtgtagtaatgtgtgtacacatgcatatccacattcacctgcatataagtgatattgcatgcatacatgtaggagtgcatgcacgcacgcatgcacgtgtgtgtgtgtgtgtgtgtgtggtgtggtgtggtgtagtatgtgagtgtggaaatgtgtatatgcaccgtaacttgtatctggttgatgctgaatgcatccatgtaggggtgtgtgtggagtccaaggctgacatcggctgtcttcttttatcagtctaccttatacaatgtcacagggtttctctttgtaactagagttgatttctgtagctaatttgaacagcaaacttcctgtggtgatttattgtttttgcctcctgtattcagggattagagacaggctacctcattcatcctatttttatatggtttcttttcatgcaaactatgatttatataactctatggcaagcactttacctgatgagccatcacctaaggcttgaaacctgcacatcattgtggagacattttctgcatactcaggtagtctataggtgctaccaaagacagactaggaaaagaatcagattacatttcatgtttacaaatgacctggaagtataaatgctctacctataaataattttcaaaagccaatatctgatcatcctatagtaactctgtagtgaccccaaatagaattgaaacatctcagattataggctcatgtctcctgtgagaggcagagcagatgacatacatacctgttctgtattatttaattttcttgttattgcaaaaaagtatcagagacaaattaagaaaaaaaagcatttctgtggtttaaagtttgtgaatatagtccttcttggtggaagagacatggaagcagggtcataaataggctgatctcatcgtactgtagtcaggtagtagaaagaggtgtactcagttgtgtggtgccactcacatttaggatgattctttccatctcaattaacacaatctggaaactgagaggccggtcagaagatttgtctaaatccagttaaatcgactagaaaattaaatatctcatgtctaacttcacatacaactggaaacaccatgctctaacaggcatttcttgtttgtccaaccattataggaggtaataaaaatgctttttgtgcctgtgatctgaaaactattgtgtttgtaaacttgatgaagttagttgtgtaaagtgttttataaccaaaacatcatgacttaaacaaaaatgtcaatatgaaatgtcacattcttatttcaattgctatgccagtaatcacatggaagaggtctatgagaagcggaagttgctcttcctcctcctcaattatcttgccattagaatacgagtataagtatcacattttctacatctatattcaggtcgctgcttagagactttagccctgcaactgcaaagttttacttctggattaacgcacagaagaaattgtttatagagtcatcaaatgtcatagctctggacagtaaaggtgtatttgcatgattaccaaagtctttgttcctatgaccattgaccttgcatctgtgttaatacccacatgtaaattctgagtattatgatcccagaacagttgaaaatcactcctatggaaagtctagagaagatggaagtgggaatagattcaatgaatcaggaaaatattacgagtaagtggtatttacatgtgtatcgaacagaggcgcacaacttaaaattagagtataaagataatggacttcacaggggaagaaagacttataccataggaaaaggacacatctgaccttctggaaagcaaattaaggatattagacacttgtcaaggcatctgtggatgtgataagtgaaagaccaggaagagaagatcagagacagagatgtgacatggtattccagtttacattctgtttctatcctaaagcactggccagaaaatcattgtgaggagagaaagtgtttatcttgtatccaagaatctttgaatgaagctgaggaatttatggcagaaacctggaagtaggaactgaaacagagatcacagaggaaagttgctttctggcttggttgatctagctcctgctcagccattttattatatatttcagtcccatctgctcagtgcatggcaacaccatgttagattatttgctcttatatcattatcaattaagaaaatggcctgcagcaatgccacaggccaatctgattgaggcaattcttcagtagagtttgttaggttgacagtcaagatttgctatagtaaaaggtaaaggcagagcttacaaaatacagtacttaacagcatgcatgacttagagaagtcagaggaagtgtagttagggaattggaacaacgatcctcctgaaaatatcttttgaactttaaaatatcattgggagttgaaagatacacaggcttaggggttggagagatggttcagttggaaaagtccttctcttttcagcctgagaacctaatgttagttctcaaacatccatattaaaatgaatgaatgaatgaatgaatgaatgagagagagaaagaaagaaagaaagaaagaaagaaagaaagaaagaaagagagagagagagaaagaaagaaagaaagaaagaaagaaagaaagaaagaaagaaagaaagaaaggaggaaagaaagagagaaagaaaggaggaaagaaagaaagaaagaaagaaagaaagaaagaaagaaagaaagaaagaaagaaagaaaggaaggaaggaaggaaggaaggaaggaaggaaggaaggaaggaagaaagaaagaaagaaagaaagaaagaaagaaagaaagaaagaaagaaagaaagaaagaaagaaagaaagaataaagttccaggtagagcagttttgtttaatcctagtactggggaagtggagacagtaggattcctgaagcttacttaggtaaaaaagtgagcttcatgttctgtgagttatttcatctcacaaaataatgtagagaacaatgtttggcctccacacatatgcacatatagttccctgcatacataatcacctgcacacacagtcacctgcacacacatgcacacagtcacctttatgcacacacccataactaatcacctgcacacacacatatatacagagttatttgcacacacagatatacacagttacctacacacatatgtgtacccacatactacctgaacagacatgtgcataaacacaaacataccatacataaaaagtagaattgtttattttcaaaatttttatagttgattttatacatgtttttgagaaatagtttgtacttgagaaattcctatttatatctttaaattttctgtacttgccacttagaaaattttcttgtgctgtacatttgagacatcaatattgatagttatcattaaaaactaagcagcagcagagtttatttataagatagttttagttttcccaatctctgatttgcacttctggttttcatttattttctttaatttggatacgatggattgttttggcttatgaaagggatattttttctgttactcaactctactttgaagtatgttatgaaagtggattgaaatagtattttacagaaactagctagagtatacacatatattcatatgtatatatacaaccagacactcagcccaagtgtgtataaagaaaagtaaatacagaagccatctggtctttcctctatctttttggaggaaagcagggaaaaaagcagtgagagaatgcttcactctagaattttagagtcaaagtaataagcctagaattaccaatgcaaacatcgtaaaattttaatagcggttttagaaattttctggctacgttttagttaaaaccttcaagtgcctgagtctgttcccttatctgtaaaattacatatatctacatgacttaatggaatttggggatgattaaataaggcactatgtgatgtgtaacattggcaatcatctcaacagaaatgatgtagagttagatctaccctagatctgttttattgatatcaagtgctcaatatagacagagcaattccacccacatagtgagtgatcagtgtgtattgactctttatccttagtgtatcttagaatgttactagattcacctacattgcaaggttattttttcaaaggataggtaaatgatatagcagaaacttgaaatgaataagtagtgaaagaaaaaaaaatcctcctttagtatctatttctcatagtttctgacaagatcaggttacaaatcgtactactaaactgtacatactactaatatagctttaaatcatttcactcttttggttacactcatagggtttttaattaattaattaattagttaattagttaattaattaattcactttacatcctgatggcagcaccccctcctatcctcctatccccactcctaccaccctgcttttattccaatcttcactcctactcagagaaaaggagcccctcacaataccaaatcactctggtacatcaagtctcatcaggactaagcaacagctgatggaaacagatgtagagatccacagtcaaatactagacagagttctggagtcttgttgaagtgtgttgtggggtgaggagggagggtgttgaggaagagagagggaccaaggacagcacaagaagatctatagagccaattaacaggggtcaatggagagaccaactcccagagaccaaccatcaaccaaagagcatgcatgcactggacctgggtcctctacatatatgaaccaaatgtacagcttggtctttatctgtgtctcccaagaattggagtgggggctgtctttgactcagactctgttgtgtgcctttggatctctttcctttagttggactgccttctctgtcctcagcaggagaagttgtgcataatggatttttaaataatgtgtgaaatgttgtattctatatgactatatggtgaatgtgactgtcatagtgcacatgaggagggcagacataatcttggaaatcatgaaagtttatctttacctagcaccttgcttgagatagggattcatgttgttctctgctatgtatcccaggctagctcactcataaactactaggattctcctatttctgtcttccaacttctcttaggagcacagggattaggtgtgtgctctactgtgtcaagcttacaaatatgtgttcagtctgagaaaatatattcatacttccatggcagtgctattaccacccatccccttcctcagattcagttaatttggattttaccaattggtctgaatattcttattttatctctgctctattttcaaatcacacacacacacacacgcacacacacacacacacacacacacacacacacacacacacacctaacacacacacacctaacacacatgcccagcatggttctagaatcttcctcattatctacttcactgtatcatctcttacctctcagtacttccttcacacttagcactacagaattcagtttctgacattacttcaaatgttatccagagtgtaatccattatacctcattccatggcagacttacttctttctagctttctcttttgaggctatgcctgtgcttggcaaatacagaagtggatgctcatagtcatccattggatggaacacagggcccccaatgaaggagttagggaaattacccaaggagctaaaggggtctgcaaccctattggaggaacaacaatatgaactaaccagtaccccccaaagattgtctctagttatatatgtagcagaggatggcctagtaggtcatcaataggagaagaggactttggtcttgcgaagattatataccccagtacatggggaatgccagggccaggaaacaggagtgagtgggttggggagcagggcggggggggggtataggggactatcaaaataacatttgaaatgtaaatgaccaaaatatcttataaaactgtttttcaataaagtttaaagtaatttttctcagaatatacttttaattcttttttttttttgtatgtggagatatttaaaagactcttgttagtatatgagcaattttactgtgaatgtctaccccaaggaaatgacagctaatccaggatgcttggcaaatttgtattctcttgagactagttaggtaaggataagaaatgagtttcaccttgttgtttctgtggtggcttcccagaatgggtactaggttgcttctgatcagtacagaagccagattggacctttcaaggaaataagtgaaaggattctctcatagctctaattcccagactgaagcagaagatcagagtgtggcctgacacacctgcaggaacataacactgcacactcagaattcacttgtcctctccccttatctttgttcccagatgaatcaaccgttcttaagtttgattaaattaggttcaaaataatataggtgccaggtgtacttcagagctttcttaatgcttccaaagttccaaagaccatatgtagaaaattcaaataggacttgactcacaataaaggcaaaccgcattactggtgacaaaagaaaggatttgaaatacaatgatcttgtactagaatttcagcatttggtatggtagatatatgctttgtacttaatgtgtagacataataagctttcacatgcttaatgaaagtatcgatttataaaagagttcagtaaacaatttccatgtggatgaagtaaaatgttattagtacctgctgttacctcttacccccatttgtctttggagtcagcaatcatggataataatctaaatgaaaagacagttcacacaggattggatggggttcagcgagtaattaagatgctattgcaaacattaagaccaagttagatgcccagattccatttgcaaagtcaggcacatttaacacacttaaatgtcaggactgaggaggcagagacaggctgatccctgcgactcactagtttacttagtgagctaaaggctaataggaactggcttaataagtgaagtgagtagttgttgaggaaggacacttttgattaccctctggcctctctacctctccatgcatttctatacacatgcataaacacctacacacacacacacacacacacacacacacacacacacacacacacacaatgcacacacacactcatgctcacacatacactgtaagtgctcaatactcaagtgcaagattgttcatagttagcctcctctgcctgacaaaaatagctgcagcttgcttaagcatagagcacctctacagaactggtcacagttgaagtttacttactcgtgcatccaggcaaaatatattttctaaaaggctgaaaactttcattcattgcaccactcctgacacagcatgggccaatgcctggtccacatttaccacacaacatatactgaacaatttgaagtccaagagaagaatttgctaaaatgtttcccattttgcagcgaagcaatatgagactccagaagaacactttcctaagatggaatagagaataaatgatgggatgatggtggtagactgaggagtcagtagtttccaccaagatacataccttctcattaacatcaccttggcataagaatgaatagtgatcagacaatgatacatagctttcctaaatagctactcccagacttgggctcaaattcaggcatgttgttaggtgtcccttacacctatactgtctggtctcctactctctcactaattaaatatttgggttggatgctttccctctccagtgtttgttattgttgttgttttgttttgtttttagataagatcttcctctgggtcttgagctcatcaattagttaagctggcatagattcccgtgtatgaaccatccttctatttttgttggtttgtttgttggttggttggttttatttcacatgcctggaaatctccacaaaggtgagactatctggccatataaccacacattctcaagaaatgagaagacacagttatcatgattttcaatactggcagatccttaaccatgttagccatggaatattcagagcggtcccaaaaccctacagcgtggcacactttccttttacactaggggtcacttctattgattttagattgacatgctccaatcactttcttctttgctattatccatgtacttttatagcaattgtgtcagtacagtttcacaagagattcagaataattctatctatgtgcttggattgttttggcagcttgaattagcacccccgggaacagctgggacaaattatgacctcctagctttatgctatgtaaaatatataataaacagaatgtaatgaaattttgtacagttgtactaaactgtgaactagcttccatgttctaactataattcctctctagatttcccatacccaggtccccatttagtgcaatgccagagtgcagattgttcaaaaagagccatatttttagagacttatgatatacaatgagttaaataccaattaactcattctttctaatatctttacatttagaatggaattttaaaaatcctgactggagagaaagctcaattggtaaccaggaagacttaaattcagttccaagatcccatgtgaaaaagccagccttgccgagatgtggttcagtggttaagagcatatactgcctttgtagagaaccagagttagattccttcactcatgttgggcagctcacgcctgcctgtaaccccagctcaagatgaccactcatcttttacctttgtcagtccaaagcatcacacacacacacacacacacacacacacacccctaaatctaaagctaaatatgcttttaaaaggtcagatcactcttctatgtatatgttgtggctgttacttggtgttttctatgggaatcataacattaggaatgaatatgtttctgaatccttttcctcgtttttggatcctttccctcctgttaggttgccttgtctagttttagtctgagggcatttgccttattgcattttgttttgttgttttgctagtatctaggtatatgacaatgatactctggactcaattagtatgcaaaagcagagtgtttcttcagctgaatttcctgcatgcaggggtctcccaatttgggaatggagaaccctagtggattcacagacccagctgttattgccagttaggggaatcccagagagtgttgtggtcccctttaccttgattggtgagctctatctatacgggtataactgattctataattagttaggctccaaagatttcaatcctggggttgtttatccattctaactaccttttcttacttcaggccagatgataaggtgtcctgtaattagctgcctgcagctgtggttggcttaccacagcttcctgtatctgggttttcatttctaggaaataaaaactaagaccaagtctcccaaactgatagtttgcagactgtcatggagtcagcctggctctggctaactcagtcctcttagtgtatggttgttgtccatttgaggcctgctgttttctgttgggagatagaggaggcatggatctagggaaaacagaagatgggggtgggtctgggagaaatgaatattgtggtcaggtggtaatttattagaaaatcatatatatatatatatatatatatatatatatatatatatatatatatatatatatatggcatatctcacccttgtggaaatgaagatagaaggatccttagggctcattgaaaagccaattagatgaggtcctctattgtgacaagctcaatctcaaaagtctacggtggatggtgccatccaaagaatgagatccaaggatgtcctctagcctccagattgaaatgcattgatgtgtgtctatacacatatgttagcatatgtatccaaatatagtattaataattatattttaatagtgtgataaggtaatacttattatttactgattacacaagtaggtggagctttcaatagatgccctcatgtttctcatgttttagtaatacctttctaaattgaatatttttatcttcatttttaccaataagaaaagtaaaaggtagaggttacatgattttccctgtgttgtaaaactctctaattggtgactcagaattcatgtttggtctggctctcttttaatctcattaggcttccccttacctctatccccttctttttccccacccctgaggaccagtctcaagttcagcatctcacagagggcataaatgactctaatggatggaagcatcacccacacccagcagcattctcaccaggacagtattcattgccagattcctttgcacatggaagaccatagcaccatcaggattggaaatacataatgcacaaagggggcagagaaataatagcctccacactatcctgcgtggaatctgctacccttggccttgtagagtagatgacaaactatgctgaaggacattaccttctgaaagcttcattctgtaagaaagtaaggactcagtttgggaggggcagagtgggaactaggatggcagctgattgcaaccttgagcttataaacttcacaggtaattcatccttatcaccccatccctgatccttcactgggtcctctaattcattatgataacgagtcctttgctgataccctgtggttttaagcccgtttaaataccaaatgaaacacttaacagtccaaatttaacaatattgaactgcacccaccaagagcagtcagtgtgcctgctcattgaacgacccgtaaatgggtctaatcatcatttcctctgtcttctgatttgtcacaggtttaaaagctaacctttctaagctagaacttgggataagttctatttattcacatatatctgggtctcatgcaaacttccctcttgttagcatgttatatactatgctcagattttacatgtttacaagagttttagtaacactaattttgataaaatcattttaatttatttttattctttatttttcagattttttcaatcatatgatttttctgtatctattctatgccatggaccgggcctagtagacccccctcaatccatgggaatcaggggttcagacagatgggcatggagtcagtgagaattgacagacagatgcagacatgagagaatgtgttggatctgaatgtaatttgtcaaatcaagcatcaaactttctatacagaagaaaatagggaagttaggtgacacatcggcaaggtacaacgaggttaccagatgcttaatgactcttacacaaaacagaggaatgcaaacacaaagactgacaggaactgggcagtgaaacaactgagacaaagtcagttctattaaaggtcagctatagtcttataatccaggtgtgaggtctttacactcccagcgcaagggctttcatgcccaagtcatggttctaattagggagttccactctagctaaccttctcatgaataatgcaatactctaaaaccacagcccgatctacttcctaaactattgtaaattcctgtatataggagtgacttggattttattctaagtgatagtgtggggggactttctactaataagtaatgtagtctgccatatataactataataagaattctaaacttactttgctaagcttgccttgagatttctaactctgtgtagtagatagtaatgcctgttttctttcactatctcgcttagaatattagatgcaattctgaatgttattaaataggcaacattcttactgaattccaagcccatggtcgggtcaaggactacctatgacattgatgaaggccaggaagcaaagttcgattttgcttaggtatttggcaagtcattgcttggaggcacctataacaaaacaatactgaaaggaagcacacagatccattcgcaaggacaaaattggagtgtatgtgctatggaatgtcacaataccaggagactaagtttccgtgaaactcttcatcttgggactgcttccaggtttctcaacctgtcaagcaagtcactactggagtggatgtagcaattctatcctccaaactttcccatatacgcctacctgctctccttcaaatattttgccttgttttttcccatcaattattattgcatatatatatgtatataaatattattaaatataaagtatttattccatataatgttacttgtagtatatgttttcaggaatggcactttgatactggaaaaccaattattgtgctcctccctgggaagactaccagtactgcacccagctttatttgattgtcagtatttctttatataatgggattaaggcctcatgagctttggaaaaaatattttgatcaaaaccattaggggttaagggctgaagaaatggctcaatggttaagagcattgattgctcttccagaggttctaagtttaattctatgtggtgtctcacaactatctgtaacggggtccaatgccatcttctagtgtgtctgaagacagctacagtgtattcatatacataaaataaattaacctaaaaaaagaaaaaaaactaaaaattaaataaaaaatcagaacttgatatgtagttcactaggtaaagtgcttacctagcatgaagccttatgtaccatccccatcacctcatgaactgagcatgatagctcactcctaattcacagaagcaagaaaatcaggatgaactatagagcaaataagagcccaatttggtcatgagactctgtatcataaatcaaccaaacttctaagaagaagctacaactgtcttgattcagttctgcaatactagtgctggggagacaagaggatacctggtgctgctggccaggccgcatcactgaatctatgaacttcagattcaccaagagacccccatgtcaacaaaaatagggaggtcttagttttttttttctttttaaaattaattttatttgtaattcatttcttacaaaccttatttcattcccctcctcccctcccaccctccaactgctccacatcccacacctcctccccagtatacccagtctccacatggatgcccccaccctctaccccatttgacctctaaactccctgaggcctccagtctcttgatggttaggtgcatcatttctgaatggacatagatctggcagtcctttactgtatgtgtgttgggggcctcatatcagctggtatatactgtctgtttggtggtctagtgtttgaaagatctcgggggtccagattaattaagactactggtcctcctataggaccatccttttcctcagctactttcatccttccctaattcaacaacaggactcagctgcttctgcccattggttgggtacaaatatctgcatttgactcctttagctacttgttgggtctttcagagggcagtctttgtgagtgctccatagcctcaataatagtgtcaggccttgggatcctcccttgagcagtatcccactttgggcctgtcactggaccttcttttcctcaggctctactccatttccatccctgtaattctttcagacagaaataattatgggtcagagatgtgactgtggtatggcaaccctatccctcacttaatgtcttcctgctggaggtttgctctataagttccctctctctactgttgtgcattacattaaaggtcccttgatttgagtcctgggagtctctcacctcccaggtctctggtgcactctgggtgtgggggattatttcctgccgtctactcctcttgggtgaatttgcttcctttttttctagagcttttagatgtgttgccaagctgctagtatgtgctgtctcccgtttcttcttggaggcactcagagctatgagtttccctcttagaaatgctttcattgtgtcccataggtttgggtatgttgtggcttcattttcattaaactctaaaaagtctttaatttctttctttattccttccttgaccaaggtatcattgagaagagtgttattcagtttccacgtgaatgttggctttccattatttatgttgttattgaagatcagtcttaggccatggtggtctgataggatatatgggacaatttcaatatttttgtatctattgaggcctgttttgtgaccaattatatggtcaattttggagaaggtcccgtgaggtgctgagaagaaggtatatccttttgttttaggataaaatgttctgtagatatctgtcaggtccatttgtttcataacttctgttagtttcactgtgtnnnnnnnnnnnnnnnnnnnntgttcggttaagagaaagagctaccgattaaatggtaataaaagacattggagtccttgggttagaagaaggcactagggtgacattgcgatgaggagcttggtaagtgatattagttgtgaggggcctgcgtgcccaccccccttatttgctgaggttgcctgtttacattctttctgcaggtcctcagggcttcagtccttttcccattcccaataccagctcaggttcccctcttcccacctccaccatccttccaccctgtccactttccctcccaagtccttccctccctccccacttatgattgctttcttctctctcccaagtgggaccaaggcatctttacttggaccctttagcttgttgaaccttgaattctgtggactgtgtcttgtgtattctgtatgtttgttgttgttgttgttgttgttgtttttgttttttgctaatatccacttattagtgagtgcataacatgcatgtcctcttgcatctgagttacctcactcaggtaactcaggatatttccatttgcctgcaaaagtcaggatgtcttcattcttaatagctgagtagtattccattgtgtaaattaaccacattttctgtatccattcttctgtcctggaacatcttcttattgttgtgaaattatactatgaacacagcagctcttatataggaaaacatttcattgagcttggcttacaatttagagtccatttaatcagaacaggaagcgtgaagtcatgcaggaagacatggtgctagagaggtaactgagtgttctatatctggatttacaggcagtagaaaaagtgtgaactaatggacataaattacaaggtcagttgtcaaagtctgtagttaacagagttcacaatgggtaagactattgattacatttctgccttgaaaggtcataaaaaagtaaagaatgcatccagttttaacgagtaatataagtttaattttttctgcctatacatgtagtatttttctataaatcattttataataataggatcatgagtagatttctcaatggacaaagggcttactctgcaatcttgaacacaggaatttggatgcctagaattcatgtaaatgatatgtgggcagccttgtattattattattatttggggggggggcggttcgagacaggattgattgctctgtgcagtcctggctgtcctggaactcactctgtaggccaagctggcctcaaactcagaaatctgcctatctctgcctaccaagtgctgggattaaaggcatgtgtcaacactgcctggcaggcagccttgtatttctagccttagaggatggagataggggattctcttagtagcatcactggatgcctcatattaataatctttgggtttaaatgagatatactgcctcagtaaataaagtagaaaagtaatgggtgacaatgcctaacatcaatcttacaatgtatccatattgaatgaaaaaaatggaaaatttgtttatggtgtgtgtgtgtgtgtgtgtgtgtgtgtgtgtgtgtgtgtgtgtgtgtagctatcacatataaaggctagcagagagccttggatgtaattactctagtattgttttaaaataaacattcaaactgacatggagtttgtgaagtcatccagactttctgatccataagccccactaatatgaatgttttctctgtgtcagaactgggattaaaagcatgcactattgtatgcagttctctttctttacatgggggttctgggttaccaactcatgtccttattctttctaggcaaggactgtactaactgagtaatctccccagtgtttatttttcattcaaaaatttacaagaaatataaagaaagtttttctctactggcatttaaaaatcttcttagatttgttagaaagtataactctttaaaatctagttaaagagtattctagtgatgctacccccagctattggaattcttgtaggaagtagagtccctggttggaaggatcatcattctagtttaacaagcccagtctgaagagaaacttttgatcatgacaaactcagtttgtcttcttgtgttacactcttgaaacaaacaagtgacagagttctatattgaaatggcatgggactgcttactattctttccccagtgcttagagtttggggatcaccaggtaagttattactataattatacaaatgaatgaataagaatttcttgttctcccaaaaatttaatcttgtataaattgaagtgatccttccaacaactaagccaaactttccatcaaaatatacttagaaaacaaatagatacgattgaaactggccatgatatttcaaaactcagagttttgaaatctcctggggtttctcttgggttatccatgtgtggggaccacaacaatgtaagcctctgaactgttattccatgtaagccatgatttttttcaatgttgaactaaaatacattgccttacaaccatttaaatagcaactaaactaaatattggtattaaaaacaataaggtgtaattgtgaggatggtctctgtgaaaatctatgaatcctttataaccaagcacattggcaggtttatgttatcagtgagaaactacagctcactctcaggcatgtatcagtgtaaagactatatgcacattttgtgtaatttttcttttagtgagatttatttaattttaatcttattattcaatcttaaattggtgacatttttcagtatcttttgttttctctcactaaacttgttttaatgtgtctcaagattctgtgacagatttttggtcaagttgtttccattcaaaagtactgtttttgtaaactaataatttaaaactgnnnnnnnnnnnnnnnnnnnnnnnnnnnnnnnnnnnnnnnnnnnnnnnnnnnnnnnnnnnacacacccacccacacacacacacacacacacacacacacacacacacacacaaatggttcacaaaacattctttcctactgaaggttttataatgcactgttatcaaagaagtcagcacctacattaagaaaattggctacaaccttatcacagtatcctttgtgccaatttctggttggaatggtgacatgctagagccaagtgctaatatgccttggttcaagggatggaaagtcaccagcatggatgacagtgccagtggcaccacactgcttgaagctttggactatatcctgccacgaactggtccaacggataagcctctgcaactgccccttcaggttgtttatacaatttggagaattggcactgtccccgtgtgccgagtggagactgttgttctcaaacccagaatggtggttacctttgctccagtcaatgtaacaactgaagtcaagtgtgttgaaatgcaccatgagcctttgagtgaagctctttctggggacaatatgggcttcaatataaagaacatgccagtcaaagatgttagatgatgcagtgtttctagtgacaccaaaaatgacccacctgtggaagcagctggcttcactactcaggttattatcctgaaccatccaggccaaattagtgctggctacattccagtatctttaatccgtaaaaaaattattcctttcaaattacccaaacataagttgagccaaataagctgtagggatttttatttgttggctttttgtatgtgtgtgtgtgtgtgtgtgtgtgtgtgtgtgtgtgtgtttggaaaaattacatttactgaaataaaagcaaaaggatcatattgaaaatattccaacatgagaaaggcagggactgaaaaactacaagatgaatacctaaatattccaaattaaatttctttgattgtgtgttagaatctcatatctttgtggaagaatattttgatgcagctcctaatttctaattagatcaattcatcttctgaatcataggggaataaaattagtaaattctgtgaatttgtataaaccttaatttaataaaacttgtacacatatcatataggaaatatatttgacaaatcttattgtgtaaaaatattaatcaaaggaaaaaagggaagattatataaagaggtaaaaatattccatcccaaaataacatgggcttaaatgtttcaaatgttattataatgatttaaaactgatgatacccttaatttttgtgttttctctgaattggcctgaaacattaataccatatagaagtatgttctatgttgcatcaatgaacaatttcaagtcacacccaccaaagtattattgagttcacgtccaaacaatattattcacaaattttaaactgtagcaataagacatgacaaaactaacactgattaaataattagaaaggtgaatagttagcttgcttattnnnnnnnnnnnnnnnnnnnnataggccagtaaatgactcagaaggaataagcactttctgccaacttggtgaccagagtttaattcctggaacacacagcaaagaataaaagaaccaactgttccaagttaccctcttagggaaacagagtgtctgatattaaagtagatcatgacaggacttaggaggaaccttatgtaataaactgcttgctaacaaagcattagaacctgagtttgatctccaatacccagatatacagcagaagtcttgatatgtgtttgcaatcccaatgccgaggcaagcagatccatgtggctttctgcagattgtccagcttaatgggaaagcctcaggttccagtaagagacctatttagaaaaatatctatcggcatggatccttagtagtggcaacagtggttgacttctgacctctactcttattcacacacatgtatatgtacctatttatgtgtttatccatgaatacacaggcatacatatatatgtgcatatgataataattcaataataacaaaagttggccatgctacccttgacctgctgctgattcactcagttgtgtttttataaataatgcacataatgtgctattatcccacgtaggatattctctcaagagattttttaatgacatgtacatacttgaccattgtaccaatcaccaggagtaagtcttgtggcagaactgataagcacagtcacagtaaataaaataacaagaaaaagtaaacaatgtccatgttattaaatatattcaaccagttagggttttataaaaatgcttggactaagttagatatatattaaagtgtccaaatagctctgtctgaaatgcagtatgtggatttgccttagcttcttttcctacaattaagtgctctacccaaagcaacttaaggaggaagggcttattttgactcacagttctaggttaccatctatcataattggaaagtaagacaaaagtatacaggagctgttcatatcacatcttcaataaggaggcatagagataaattcgtgcgagtgctcagctcactttgtccattttaaacagaccataatgcccagcccaagaaatggtccagccaatatttaagattagccctttcctagtcagtgttttatttcaatgaacagacaccatgattatggctcttatgaaggaaagtactcaattgaggcttgcttacagtttcagaggtttattctattatcatcatggttgggagcatagtatattgtgcacagacattgtcttcaagaagtagctgagagtactacatctggtactgcaggcatctgacactgggcctggattgagctttggaaatcatcaaagttagtgacactgtacctgcaataaggccacatctcctaatccctttcaagtagtgccattacttaatgaccaagtgttcaaatatatgagcccatggggaccattcccatttaacaccacaaaccttcacacatcaaataatatgatcaagaagatccctcagacatatgtccaggagcacatctctcaggtgatatagagttttgtagcttgattactaacaccaaaaataacaagattgtagcacagttcagtgctcaaccatcttaagaagcaaaggatgggtagtaaacagagcaagaatgaagtccaggaggatcatgctggatatcgtcttctataaactagaagaaatcccaggccagttgtattggaagagaataagaaagaggggaatataagaaagacacatagacagcagacaaaactctcaaagctttaagttttgaatgtgtttgaagctaattaccttgggcacctcttagacatttctgtagtggattgaaataattggtaaatgaaccagtaagttcatttttactatcattccaatgtggacagagatgcagctgtgttcacaacataatggtacatctcctgacggcaaagtaatgtttgaaaatactctataatgccttatagcactgaagaccagaacatgagatgacttgaagaagatcgatctctctctctctctctctctctctctctctctctctctctccctcccatttctcttctccctcttttcctttttctattctccttagttttctctttcaactgaatgtggttgatgataccactgcctttctcatcttgcatatgatcaaatacagaaacaaatgaatgcatgaaagcaattacttctgggctgttatagatgccataactatatatttaaaacatattttttgagcatagtgggtacagtaaaacctttgagctagcgctgaatttcattcaattcagcaatgaaaacaaaatctttaatttttccatgtttttatttttttaagatatttctttatttacgtttgaaatgttatcccttttcctggatttcccccagaaaacctcctaaccgcccccccccccccgcacccccactgcttgccaaaccatccactcctacttccctgcccaggcattcccctacagtggggcatataaccttcatgaaaccaagggtcttccattttattgagcttcatgtaatctatgaattgtatcttgggtactccaattttctgggctaatatacacttatcagtgagaccataccatttgtgttcttttgtgatttggttacctcactcaggatgatattttctttctttcttttttttttattacgtattttcctcagttacatttccaatgctatcccaaaagtcccccataacccccccccacttccctacccacccattcccattttttggccctggcgttcccctgtagtggggcatataaagtctgcgtgtccaatggacctctctttccaatgacggccaactaggccatcttttgatacatatgcagctagagtcaagaggtccggggtattggttagttcataatgttgcacctacagggttgcagatctctttagctccttgaatactttctccagttcctccattgggggccctgtgatccatccaatagctgactgtgagcatccacttatgtgtttgctaggccccggcctagtctagttccatccatttgccaaagactttcatgaattcattgtttatgatagctgagtagtactccattgtgtaaatggaccacattttctgaatctatacttctgttgagtgacatctgggttcttttcagcttctggctattatagataaggctgctctgaacatagtggatcatgtgtccttattacatgttattgaaacttctgagtttatgcccaggagtggtacagctggatcctcatggagtactatgtccagttttctgaggcaccactaaactgatttccagaatgattgtaccagcttgcaatcccaccaacaatggagaagtgttcctcttcctccacatgctcaccagtatctgctgttatcttagttttttatcttagccattttggctggtgtgaggtggaatctcagggttgttttgatttgcatttccttaatgactaaggatgttgaacatttcttttttcttttttttttttttttttttactcttacattagttattttactgtcgttgtgctagaataccaccacagaggcaactcaaagaaggaagtgtttatttggacttatggtcctatagggttagagtccatgacttggagcaaagtcatttgaggaatgatgcatttgaggaacaaatgtgtttgggaacaaggacatttgaggattcacatttcaaataacaagcaggagcctcccagtgacacacttcctctaataaaaccatacatatgggatcccacttctttttttttttttctttttttttgtaacccaatcacaaagggacttgcacaatatgtactcactgataagtggataatagcccagaaacttaggatacccaagatataagatacaacttgccaaacgcatgaaattcaagaagaacgaagacaaagtgtggacactttaccctttcttagaaatgggaacaaaacacccatagaaggagttacagagacaaaatttggagctgtgacgaaaggatggaccatctagtgattgccatatgcagggatccatcccataatcagcttccaaatgctgacaccattgcgtacactagcaagattttgctgaaaggacccagttatagctctctcttgtgagactatgccggggcctagcaaacacagaagtggatgctcacagtcagctattggatggttcacacggcccctaatggaggagctagagaaattacccaaggagctatagggaactgcaaccctataggtggaacaacaatatgaactaaccagtacccgggagctcttgtctttagctgcatatgtatcaaaagatggcctagttggccatcactgcaaagagaggcccattggacttgcaaactttatatgccccagtacaggggaacgccagggccaaaaagggggagtgggtgggtaggggattgggggggtgggtatgggggacctttgggatagcattgaaaatgtaaatgaggaaaatacctaataaaaaaaaatgaacatttctttaggtgcttctcagtcatttggaattcctcagttgagaattctttgattatttctgtaccccattttataataggtttatttggttctctggaatctaccttcttgagttctttgtatatattggatagtagacctctatcaggtgtagttatagtaaagatattttcccaatctgttagttgctgttttgtcttattgacagtgtcctttgccttaaagaagctttgcaattttgggaggacccatttgtcaattcttgatcttaatgcataagctattggtgttctagctgggcgtggtggcacatgcctttaatcccagcactcgggaggcagaggcaggtagatttctgagttcaaggccagccttgtctaaaaagtgagttccaggacagccagagctatacagagaaaccctgtctcaaaaaaaccaaaaaacaaaacaaaactacaaaaaaaccaaaattacaaaaaaaaagaaaaaaaaaagaaaaaaaaaaagctattggtgttctgatcagaaaagtttcccctgtgctttgtgcctgaggctgttctccactttcttttacattagtttcagtgaatctggttttacttgaaggttcttgatccatttgtacttgagctttgtacaatgaaataataatggatatatttacatactactatatgctagccaccagttgaaacagcactattggttgaaaatactgtattttttccactggatggttttagctcctttgtcaaagttaaagttaccttaggtgaatgggttcatttctgggtctttaattctattccattgatctacctgcctgtcactataccaatactatatagtttttatcatgatttctttgtagtacagcttgaggtcagggttggtgattccactataagttcttttactgttgagaatatttttcgatatcctgggttttttgttattccagaagaatttgcaaatttctttttctaatactatgatgtatgaagttggaattatgatggtgattgcattgaatctgtagattgaatttggcaagatggccatttgtactctattaatcctgccaatccaagagcatgggagatctttccttcttctgagatcttctttgattcctttcttcacagactttaagttcctgtcatacagatcttttcctttcttagttagagtcacaccaaggtattctatatttttttgtgactattgtaaagtgtgctgtttctgtaatttctttctcagcctgtttattctttgaatagaggaagtccagtaatttgtttgagttaattttatatccagccacttagctgaagtgtttatcaggtttaggagttctctggtggaatatttggggtcacacaagtttactatgatatcatctgaaaatagtgatattttaccatacatttgggttgttgtgcctccattttcattgaattattaaaaaagtctttagttttttttttctttctttaatccttgactaagttatcattgaatacagagttgtttatcttccacatatatatgggctttcagttgtatttttttgttatttgaagataagccttagcctgtattgaacggataggatgcaaaggatgatttcaatcttcttgtatctgctgaggcctgttttgtgactgattacattgacagttttggagaaggtacagtgaggtttgagaagacagtatattattttgttttaggatgaaatgtactatagatatctgttaaatccatttggttcataacttcttttagtttcaaagtgtctgtttattttctgtttccatgacctgtccattgatgagagtggggtgttgaagtcttcctctattattgtgtgagatgtaacatgtgctttgagctttagcaaaattacttttatgaatatggatgccattacatttggagcacagatgttttgaatggagagatcatcttggtaggtttttcctttgatgagtgtgaactgtgctccttatcttttttgataactttaggtagaaagctgattctatttggtactaggataattactccagcttgtttcttgggaccatctacttggaaaactgttttccagcctttaactcaaaggtaatatctttgttatggatgtgggtttcctgtatgcaacacaatgttgcattctgtttatgtattccgcctgttagtttatgtcttttaattggggaattcagtccattgatattaagagacattgaggaaaaatgattgctgcttcctgttttcattgctgttagaattatgtttatgtggctatcttctttttggtctgttaatagaagattattttcttgcatttcctagggtgtagtttccttccttatgttggagtttttcatttattattctttgaagggctggacttgtgaaaagatattgtgtaaatttgtttttgtcatagaatatcttggtttctccatctatggttattgagagttttgctgagtatagtagcctagactggcatttgtgttctcttagggtttgtatgacatctgcccaggatcctctggtgtttataacctctgatgagaagtctggtgtaattctgataggtatgtctttatgtgttacttgacattttttccatagtgcttttaatattctttctttgttttgtgcatttgatgttctgattattatatgacagaaagaatttcttttctcatccaatctattggatttctgtaggcttcttttatgtttatgggtttctctttcttaaggttatacaagttttctcctataattttttgaagatatttactggccctttaagttgggaatctttaatcttttctatacctattattctcaggtttaatcttctcattgtgtcctggatttcctgaatatcttcagttaggatctttttgcattttggagtttctttgactgttgtgtcattgttttctatggcagcttctttacctgagattttgccttctatttcttgtattctgttggtgttgcttagatctatgactcctgttctctcttctaggttttctgtctccagtgttgtctccctttgtgatttcttcattgtttctacttccatttttagatcctggatagttttgttcaattctttcacctgtttgattgtgttttaccacctataagtgattatgtccaccttcagaaaaatttgatccaggtaacccctcaattgagattttcttttaaattgtcaacttgattgtgttaaatcgacaataaaaacacataagtatagactataggtgagaagttnnnnnnnnnnnnnnnnnnnnggggcccaggggaagagggggaaggggaagaccctcacaccaccagagttttacttattctctcgtctgtcaggcgtgggagggctgctgtctaccttccattcatcccctggtgggcatctaagcctctgacccattcttcaaggggtggcaaggggcagccctacctgggattcctggagctactttgctaaaaccactggggttatgggagaaaaggatgaagaaagagaggttcccaacacctcaagaatgagcgcagcaatgatgagcagagactgtctatagttttagagctttattgtagaaaggtaggggaaaagaaagaaggtagaagagagagaaagaaagagaaaggaaaggctagagagaaagagagaataagagggagagaggagaggagagcggagagaagacaaagagagaggagagagggggtgagagtgaagggtaagagggaaacaattaagagagtgaaaaagtaagagagcaagcaggggctgaacagccctttttaaagtatgctgtcttatcttattgttgctagataactagggaggagtttatcctgaaggtcagaagcttgggctattgcctatgtgacttctagccatgcttcccttgtaggggctgtggggagcagtaatttaggcaggagccagagttccaggagcatgagggaatgcctaccgtatcatgtaggtgaattatcaccattttcagggttcagacctcagttctactggagaccagcctgtctttgcttagcccaattccccacaggttttcacaactgaaacattgttatgttagagggccttcactcagcatggattctgtctttcccatagcctcatagatgcaacatccttttcttattaatccccaacctaggtactttagtcctacccatctaaattcaattaaggcatcttttcatacaactgagtggcagcagggaatcaatactccagtgattctcattacccctccttcctggagagaatatgaacagtccatagaaacctctccccatagtaaattactctcaaaaggaggcatagctgatatcttgaagatggtggtatttctaggtagtgttccttgttcaaaaaactgaagaaatgtacaaatagcaaagtcatgagcaaaggtgcaaaaaaaaagtatatttgctgcaaagaacagctgggcctgcagaagactggtgcaaaatttcttcttatagcctaagatcacaaatagggaacttcttccaaagagtgactcagccaacattgttttctgtaccaatagtcaaggctgaattggtacactagaccatgatgcatttgacaaataaagagttcctttgagttgctgggggcctataggtcacaatcaccagttacttcatttggagcagctcagtgaagttgggtatctcacattgttaaaagcactggtagaatgggataaataaatacctcatgatgaatggggttccatgttgctgtcatctttaaattacctgcctccatcttgagtccatagtaaaccatatcaggttcagagaagaagtatagtggagaagagtcgtggcagctgctagactgaaagacaactgaatcctggtgctggggaaaaggatcatgatagctgtaggctagctgaagggacagatggggattggtggaaaagccaaatttaggaatttgtaggtaacttgcaagcattcgtctttgctctctcccagtcctctcctggctgcaggccacaggacttggatgcatgtctttcctgaggcaacactggtttctcagcaggatctacaggtgaatctctaagtgtggagccaatgacagtgattactctttcaaattcctgggagctatactcctgttcataaaagcttcccaaatttgggtccaataacatcctgtcctggaggagaagggacttgtaagtttccatggagagagggacagagagagagacagacagagacagagagagagagagagagagagagagagagagagagagagagagagagagagagagagacagagagacagagagacagagagacagagagagagatacacacagagagagacagaaagagacaggttttcttcagttttgaggtcagtggtaatgtggctattcttctgtattctgtcaacagctctaatgactgattctcactggatcagaaggggcatgagagtataagggaactagttagaaagtagaaagaggataaagtgactagtgggtgggaagtgacacaattaaaatgcattatgcatgcacacaaatgtaatgaaatctatgttgtatgaataaaatatgataattaaaaataaaagaaaaaccgatttaaaacttaggctttcaagatgggtcagtaaaagctgggcagtggtgatgcatgcctttaatcccaacacttgggaggcagaggcaggcatagttctgagttcaagaccagcctggtctacagagtgagttccaggacagccagggctacacagagaaaccctgtctcgaaacaaaaacaaaaacaaaaacaacaaacaaaaaaaccaaagatgggtcggtaagtaaaagcatctgttgccaagactgttaacctgaatttgatcttcgggactcaaaagatagaaagaaaaaccctaatattgcaggagccttctgacctctgtaaacacacacacacacacacacacacacaccactgtggcatgtatgctccacttccaaataaataaaagaataatgtaattaaaatactttaataagagaaaggcataagatgctttagcttttctatgtactctctgaacaaggtatcacatgcaagaacacccttgtttccagtctgatttgggccttagtcattaagtgactaggtatcatgatttacagagacaacacttttgcctggatgatggactgcatcagtgaatcttcattttctttgcagaagcagtatatgatctacaaaaatgggacagctgaatttgctaaataaagtgtattattgatcaacctcttaaactattatgccctttccaatctgtgaactaatcctttcaatcctttcccatcacacctgcattcccacagcagatgccctaatggagtatttatgcctagtgtgtttttattggctgtcctactgaaatttttatactattaggggaaaataatctctattatatcacactcattactttatcctaccacgatcaactggtttactactcttctatcttctgacggtcccacttaccctttttttttgtttgtttgtttgtttgtttgctataattaggcagggcacagattcaatgacccattcattacaaacatgttgtagacttgtctctgaggctcctactagaacatacttgcatcacctctcctatttcttagaatcaaaatatccccatgttcattttctctctctctctctctctctctctctctctctctctctctctctctctcctctctctcccctgttacaggtttgtttctacaaatgtgtacatgaatgtgtgtatgcttgggtgtggaagacagaggcagatttctggtgccccttttctttctctatttttttcttaagatttatttatatattttatgtacatgaatgctttctctgaatgtatacctgcatgcaagaagagggcatcagatcccagtctaattgtttgaagcctccatttggttgctgggaaatgaactcagaacctctggtagagctgccagtgcatttaatttctgagccatctctccgtcccctagtgcttcttttcatgagtaaggcaactctgtgaaggtgacttaatttccaagcctttaaactagtacacttagtgaaacacatcctacctctggatcgctggatcgaattttattattccattgctcagcttgtcttccctggaagtggtttgctcttagtattgactaaacagattatttaatctttgccttcataaggttgcaagtctctatctactggttgtttcttcccaagctaacatgctggatattatactaaaaataccacaacttgtattctatcagctgtggtatggagcttttcctcaggtcatcacaaaaggctgtctttgactgcaaatctaggagtcatggaagttagagtggaacttgcagtgaaatccaggtctgtggtaatagtaaagaagctattgatactgccgagtagatggacaaggctcatctgaccctcacctgagattgcagcttttatttcttcacctgcatcctcagcagcaagtgatgtttgtaaaataaaaggaagtagatggttaatagaagtttgggtgcagcagtggctctttctattaggtcgtcactggtgatagcttgggactttgtggtgacacagctatttttaggtatcctagagtcctggaagtaatcctgcttgcataatatttaaagaaatctgataaactcatttgcctgaccaagttgaattaaaaaaaaaaaaaactatactttagcctgtcattgctgtctacatggtaacaggattttgtttttccctaggaaatgctgacacaactccagctcctgcggcgccttggaagtttccttactccttttcatgaatagtcaggagacagaattttgctgtccatagaggtcattagatcacttatttgcatgtgggaaagagggagagaaaggctagactcaagtagggtaggaactgtgtacacatgtaaccagatgctctgaggacacgtgcccatgaatttgtgtgttcgggaataaaacattttgagatgatgatttttcaaacacagatagatcctccttgcaaacttatttacataggttttcaacagatgaaaaggtagtctctctattccagcagatattgaaaggcctaaatcatcctctgaagttgttgtggagttctagatcacaagaaaaagaccagagactctattcagattctaattatctgaatttatttaaaactgatagcaagacaacagccttaaagccaaatagaagatatgccatccagagaggatggaggccagaattattacgttcatgtgaaattacagcttcatgagaaactgcttcactcccctccgctacataagaagaagctgttgatctcagagggacaaaaggtctcttactcagcttatgccagtgatagagttatagaatccagggcaagtggttaattatctcatagcagttacaccaatctggagatcttgcagattgctaggagttcacctttctggtgtttagggcagaggccaatggctactaatgagtgtacctggtacaaaatggaatttccttagccattccaaggtcagaagcagcagttagtaaaacttatgaccatcaagagaggtactccattcagaaaagaaaaagaaataattgaggaaatttttagtaccatctgcttcaatataacattaatatattatattacagttttcagttatatgtgataaaatacagatttttgaaaataatttaaaacaattgatgaggcatttttagggctcaaaggacgatataaatctagtttttatctctgtgttcactacaacacattctaattttgccaaaagtgtctgtgatgaaattagacaaatgctctgatttttacaagttgattgttctattagtgaaagtaattaagaaaataatttagcaagtcttcagaatcataactataattattatgctacaaatgtgaaatactttgtgaatggagtggtcaaagtttgagcaactgactcaggctggtgatccaagacagtttctccaaaatgatgatattgcacatctggcataaaaaatcaaggatggggatggggggtggaaggaacaacagagcaaacagacattgagataagtcatacctaagcacagtgtgttggtggagagtggcaagaagttttcaggcactcataaatgttctctaccccattctcaggtgggttgagatggtgaaaagctggttttaagtagagtgtgaatatcagactcctctatggaaacaaggtttatactatagtttcagagttaatattgattgttgtaacatatatttattaaaaatcagtctacactgttgctggcttggcaccagtggtctcagtctgttcccagtccagtatgttgcccgagatcaaaactatatgtttccccttgcaaatccctctcctaccaatgttggctctgcctttcaagagctctgaaattgctctctcggtccagcaggtagctgctgccaaagggatccacactcccagatttctgtggctagctgggggtgcactttcatcaacccatgctccactgcggagctcagctgagttgctgcaaaatggaaagcaccaggcaatcttagtttagaatcaacagagaacacaacgactgggcacagaagctattgtcctaaactcattgacagtctatgtccaaatcttccagtggtggattctgccattgcatctaacagtccctggactaaattttgcctgctttcactcctgccttgccatccaaaaggaagtgccctcctcctacatcccttctatctctcttggacccaaaacgcccacctcctccttgaccagcaattggtttcttatagtctttattatccatacagttaattaagggaaaattcactacagactgtcaacttgacaggacctcaaactacttaggcaaaaaggactctggtcactatttcttcaatgatgaccttgatcattaattcactcattcattcatttctcaaacccccatttattgtggactgaacctttgtgtggcagacgacaaagtagtcttgtctggtggcccaatgagctccaggaacgcacctgtctccttcacattatccagagagctaaatccacaatattcagtttttcctagatactttctcatactttgatcatccttttaattttttagattataattgtatttcttccttccctctactttccctaaactctcttatataccctttcccactttccttcaactttattacattcattttcattgttattgcatacatatatgcatatacatatatacatacatacacacatataaaggatatatggattctgaagtgtgtgtatatttatttttttcataagtataaccagctcacttagtataattttatgttttctggactgacaactaattggtgttcttttccttggaaaaaaatgttttcctttttttttttaattttatttcagtataattccaaagagaagtaaagcttagcaaagctaggaagtgaaagaggatgaggttacaatttaagagcttcaacttactgtaaacattgcaattgaactaagtcttctgcctgagagatttaaaagtacacaatacaaaagaaatacacttaaaaaatatatatatatttaaagctattttgcaaaaccagttaggttatttttgtttacaaagcatgtggcttgaaatttgttttattgctcaataaaggacagagtttgaatctttaaaaaaatgttttcctactccccaatttcctcagttccctatagttctctgtgtagggttggagcctcctgggctttctcacattcattttgacatgcccattagtattgttcaaattgagctcatatttgagcagtcacgttggtgagaatgtatgggtatatcttctgccattactaggagactcgatcacccagaaaaccacctgatttgatggcttttatactcttttcatcttgtcatctacaatgctgcctgaatcttcatagagagagtattttgtagacatatccaatgggcctgggatccacaactcactgttttgattggctgtggtttctatagccgtcccccctttattgcaaagagaaatttccttgaagagtgatggaaactacactcgggtgtaaggacgaatatttatagattgttgttaggggttatgctagtttaggttattgtagattctccttcaataaccatgactacactagcactgagtgagtgagttagccagatttcccatactagtcagggtttccttccaactgagcttgtcttcagtctaattagagagatgttggttgctgtcaatataagggttattgtatctttctggcctttgttgtggttcataggcatcatgctccataagactggtggtagcttctttcttttggaagctttcatgacatcacctggtaccatgaaagctaatattcatgaaggggacattcaaggaagctccagattagaagtctctgggggtttgtttctgaattttgtgatgtctttagtcataggaacttaccttctaattctggagaaaatcaagtgtaacaacaatatagctgtatgttttaaaaatctcttgaatagcctagtgcaacaaactaaatgatggctcatagttgtttagtctgtgtactggctagttttgtgtcaacttgacacagctggggttatcacagagaaaggagcttcagttgaggaaatgcctccatgagatccaactctaaggcattttctcaattagtgatcaagggggaaaggccccttgtgggtgggaccatctctgggctggtagtcttggttctataagaaagcaggctgagcaagccaggggaggcaagccagtaaagaacatccctccatggcctctgcatcgactcctgctttctgacctgcttgagttccagtcctgacttcctcggtgatgaacagcaatatggaagtgtaagccgaataaaccctttcctccccaacttgcttcttggtcatgatgcaggaatagaaaccctgactaagactaagacagtctgcaagactgtctgtttcagcatttccaatctggtgctgtaaacccagataattgttaaaaagctgctagtctttagtttacagtagaatatagataatgtaggctcttataccagcaaagggatatttctatgcccagacaggttaactttctacttgtgttaacaagcaaagtggatcacagttctccaccatgtacagtgttattcacctcattattcacagatgaatgaagtcaaatgccattccaggcctgtgtaacttctaccattgtctctatatgagcatttgcttctggtcaccacctgcattattgttttattatttgttcctaagcatatgtagctctgttccatatcattgtttctatactaaagatcatttttgggtagaaatcacatcctcagatcacttttcagaggtgcttgttctgaactatccaggctcagctcaaacatcactttttaagagactacaaccctcttttctacaggtctttagggaactgtgacatccttaatactttacagagctgcaaaggactattgtttacaatgcatatcattatgtaagattatttgtttcttttgaggatatgtgtattctccttttcttcttactggagcacaagtttcctgaagtgacagactgttttgatggctgttctctccttagagtcatgaattaagcatatcccagagaaactaacacttgcttcaaaagtagaatccagaaaagacatattttttcaattcaatttttattgaaaatttggaaagagataatacaaacccatggaaggaagcaaggtgttgttcagagtgtccaatttagttctgagaaacacaaaatatataagtgttgtaaggaatatgcttgtttgttgaaaaccaaagtctaaacctatgctcccttggaaactaagactaagcataagcttcttctatctgcagagaaatatagccattcattcactctgtacatactagagaggctttccatagtgttcttacttgcaaatcctattaatattggtcaatatagtgaaaagtgtgaattttaccaggatagaaacttaatcaatgccttgcaagttcacagattttggttgaattactgaaacaaggaaatgttggatatagaagaaatatagcatattcctgtgcccaggttaatcactcagaaggcgaagaaaggggatgactgcaaagtcagggtaagtagaagagtaagacagagaggaggaggggctggcagtagagcttgagagaactcctggtactgccatttaccctatggatgcagcccaagcaacaatattaagtgctgagaccattctgctctagtacttgctgccaaggcccatagatttgaaggagtcatcctctgaatggggaactgatgtggaaccagtaaagcagacatgtcagagtagaaaaggtagatgtgaacataagaagtcatattgaaggaggagaagaagtttatctgggaaaaccactacaatgtttaaaccttaagagatttgagagagtctcaactcattcttcctagcttcatatacatgtagagagttgtataatgtgtagttacataagtatgcatagatgttgtgtatgtaaaacattgcttaatcatatacatattaaataatttaatctggttttcttaccaataaaaattaaaatattttaatataaaaattattattttttcaatatttgaatggtgggatataactcagatggtaactcatttgcctttttcacataataatctaagttcaaatcctagtatccaaataaaaagcctggcataatgaaatgtacttgtcaaggcagtgtcttgtaggtggagacaggagggttcctagagttcactggccacttagccttgcctagtacgtgatgagttttaagacaataagaaaacttgtctctgaaaaaatgaggatgcacagctcctatgaagcaactatggttgacttctggcctttaaatacacatgcatacatgtgcttacacattatgcatacatttgcatctcttctaacaaatacacatgcccaaaccatattgaggtgtttgaatatcagtccttttatgagagataaaattctgtgaattgtgtgatccaatctaatttgtaaaatactctgcatttacttgagaacctctttgaagataaaagtgtggcagtgggtggggaagaaggaaaacagagggaggcagagaggagggaagaagggacagggggagggtcggagggagggagggaaaaacagaaagaatatacttggaaaactatgcctttaacacataccattgcctttattcttgcttacccacaaatatcagtgactttgtatatggcttagttgagtctttggagtctttcttagtatttgtatataaagtccaaagatgaatctgtatatcctttaaagcaaagcagagtatttagctggagaaaaactgccaacacttccctaaagcattcttaacgttctcagattctggcattttctagaagtaaaattagttgtgtatttggaaatgtcaagttttctagtgtgcagctgccaagtttctcctgtagctttgatggttttcgtacctgtgccattcttgtcatctccagccctacaggaccatgccaaggaccacagtggccctatgcattctcaggtcacccttctcaggagagctgtaaacacatggcaaaacattttccctggaacaatgagacagttccttaggtcctaccttttgtgtagtctatggattcatttatattacctgacttcctcacatgtttccacccaaatctaggttcagaatttctgtggttctatccaaatcatttagtttaatgtccttctgaacagtgaacatataggcacctgtagagacctagtttactttctctgcattgcaaaggcttctctgtcatccatattccttatcattctgttcgctattatgtgcatatccccagggacagttctgcagacttgggactacactctagagagaaagaaagagagagagagagagagagaaagagaaagacagagacagagagatagagacagacagagaaagagacagagtcagagagaaacagagacagagatagagaagtttgatgttgtaaaatcaaaagaatgctacaaaagatatggaaggggctggtgagatggctcagtggttaagagcactgactgctcctccaaaggtcctgagttcaaatcccagcaaccacgtggtgtctcccaaatatctataatgaaatctgataccctctacttgtctatctaaagacagctgcagtgtacttagatataataataaataattcataaaaaaagaaagagagaaaaaaagaaagatatggagatttttcagctgggaaagtgtctgtgttacatgtacaaaaactggagtttgatccctagttctctgtaaaatatgcctgctcactatgctggctatggggcttaggtaaatagttctgtggttataagcacacactcatcttgaaaaggaccagaattcagacaccagttcccagatttggcaacccactaccaccagcaactccatttccaagggaagccagtacttttaacttctctgggcatcagtgtgaatacatatactcacactcacatgcatgcacacataagtaatcaaaaggcgagtaagttccaacaaaagaaaatgctgtgtgtgatgacaggtacttatcaacttggttctgggactcaaaaacaggtggttactggggatggctggccagcttaatgagccaggtgagtgatatggagttcacatgcatacatatccatatattcatacacatgcacataaagaagtcaaataaaataataacaatttaaaaacatgaaaacataaacaactgtaagcagacaaaaacatttgctagaaaatatttgaatcccagtgctttcctttacttatatgaacaaatttcaggctcctgcaagtgctaaggcaggttgatgcaaagtatctcgttataatttccaccattgttgggtctctgggttgtaatgcatggattagaatcaaaacacatcctagctcagttggtttagatctcactgtgtagaacaatagggcttcaaactcacagaaacccatctacctctgcatctacaattctgaaactaaggctagggccactggggcctgtttaagatttcctttttctgaccctgagattctaccttacaccaatcaggatggctaagatcaaagcctcaggtgacaacacatgttggagagaatgtgcagaaagcagaacactcctcccttgctggtgggattgcaaactggtacaatcactctggaaatcaatctggatgttcctcagaaaattggaaatagatttatctgaagacccagctacacactcttgggaatatactcaaacgataccccaccatgccacagggacacatgttccagtatgttcatagtggccttatttgtgatagccaggaactggtaacaacctagatgtcccaagacagaagaatgtatacagaaaatgtggttcatttatccaaaggaattctacatagccattaagaatgaggacatcctgagatttgcaggcaaatggatggaactagaaaatatcatcttaagtgatgtaactctgacacagaagtcatgcatgatatgtactcactaataagtggatattatccaagaaaaaaagtgtacagaatacacaagatacagtacacaaaactcaaaaagctaaacaagtggaagtgcccaagtgaggatgcttcagttacacttgggagagaagaaagcaatcacgagtggagaaggagagtgaccagggagggaaagtggactggatggggtagcagttgtgtggagctgggaacctcttctgttattgggtgagggaaaaggcctgaagccttgagggcaagcagaaagaatgtaaacagacaacatcaggaaataggaggatggaggaaaccccagaatgcaccagagacatgggaggtgagaaacctcctaggaatcaaatggagggaccttagataaaataccaggcagtagggaaagggaacttacagagcccatctccaggaggaagacaggacatcaagtgaggaatggggttgcctctgacccataatttttcctgtctgaaagaaatacagtaatagaaatggagagtagactgaggaaaagaaggtccaaagtaggatccagctcaagaggatgtcccaagacctgacactattactgaggctaaggaacacttacagaaaaggatctatcatgactgtcctccaaaagacccaacaagcagctgaaagagtcagatgcatatatttgcacccaaccaatggacagaagcaggtgatccctgttgttgaattatggaaggctgaaagaaactgaggagaagggcaatccttcaggaggaccagcagtctcaattaatctggaccccctagatctctcaaacactggaccaccaaacagacaccatacaccagctgatatgaggcccccaacacatatacagtagaggacttctgggtatgttttcattcagagatgatgcaaaagactggaggcctcagggtatttagaggtcaggtggagtggggggggggactagaggcatctacagggagacagggtggcgtaggtaggaggtgtaggatgtggatgaatcagagggtgcatgggggcacagggaatggaatatggagtgtacaacgtaaatttaaaggaattttaaaaagaaaaaagaaaaaatccttttttctttttttattacatgtatatacctgtgggtagatggttatgtacacatacacaagaacagtgtctacagaatccaagagagatcactgtattccctagagctctaagtaagttaccctgatttgaatgctgggaaataaacttgggtcctttgcaagaggacagtcttgctcttaatgttttgttgtagtgaaacctcctaaagtctatctgtactatggagacattagtgttcatggtcattgtagaatatataaagagaaattaggtgaactttgagcaagataaatagttctctctctctctctctctctctctctctctctctctctnnnnnnnnnnnnnnnnnnnnccctttttccttccttccttcctctatggtattttagtctctatttaaaagactggcaatgtgttagatatttttcttactactgtactcaaatatctgaccaaaacacacaaacaaaaaacaccttaaagaaaggtttgttttatatgtagtctgagggtacagtgtatcatggtggggaaggctgtttgaggcaactgttcacattatatccatagtcagtaatcagcaagagataaatattggtgtttagccactctcctttttattaaaccagtagccttggtccatggaaatggagatgcccaaagttaggatgaattatccttcctcatttaaaccttcctggaaaatctcatgaatgcaacatattctcaatatttgttttcaatgtgattctaatttccaataaattgatatttaagtttaacaattacacacagtatctttaaacacatggaaactgagacctgaaaatgataagcaatttttctgaattcaagttctacttgactacagctgtggggttctaattcaaatacatctgagactaatacatataacctttataacctccttctgattatgtaaaagataaatacatgggttcatacaaaataaggtgtgtctctcatgttcttcagtgttgttattcctctatttaactttcctagtaatgtgaggcagagataataacagtgccaggtgcaacattaggccttttatacccctgattctcctgcttgcctgccttataccatctgaagctccacttctgacaggtgagttgcagacaggctgaaaactaagatgatgacaggtatgccatatgtactgaaggatgattcaattatttaatcagattaagttgttccaacaagcaactggttcttggcaaatgtttagaggtcactttgggaatggtgaatacccaggcatgaagaaggcagtcctttaccacaccttaagttttgtcaatatagacaacaaagttttgccatttcaacttcaaataaagatgcatgttacttactctctgagtttggagggatgatagtgtgccacagagggaaagctggtactgaaaatctttaaagagtacaaatctctatttgctgcattaaaacacacacatacaaaattttacagtatggaagagaaattcaagcagtaataccctaaatattccaacataacgaggtaattaggtagatgtcccagaaatataagagtttggctacagtagcacataccacaggaaatacaattctggtgttcaaagttccaattcttggcactgatgaacaaactaggtcttccattcaactcacttgctccattggtacaatgtaacaatgtgttcaggttaatttaattttcaatttgccaaaaatctagagtcatatgaaaactcagtttcagtgtaggaccctttagattaagctatcctttgagcaggtctgttcaaattgtctttatgatatagttaaggtaagtgaacccaatagagagcagggaatcccaaactttaaagtgtagagagggaatcagcaagaatagactcacatgcattcatttctttctgttcagtggatgtgatatgacttgctgtttcaaatttctgccttgatgacttccatcactgctgtctgataatctggaagtgagagcagaaataaaatacttcttccccttaaaaatggattttagggtattttataacagccacaatattaatgcatcatataaggaaatttccttgtgattgatgattcctccttatctcacacaggtatttcttctgtatctggatatatattttcatttcaaaaccacatctgttttttcttacatgacatttactactaaataaggaaccacaacagccacttctggttgcatggagctatatttacatggatttaattagcaatgaaagggcagaacctgaacaatgcaagtccagcatgaacatcttcaatgctgtaataagtatgttgtagttcattcttgaataagaataaccatatgagaaaagtttaatctccttgctgtactctgcagacaccaacattgatggggtgccgtcctacagtttactctcttctctatcagtattcttctcactgtatttttccctttctgtttcttgcctattggctatggattcctacagaaattatcattcattgtgcatctttgcagtatcctgtacatagactttactgatattgtagcttaaataagggactcaatgagtaagctgtttggagtgagtgtaccagaggattttacagtctatggtttattggccccatccctgtataatagtggagagaaatcaagataagcataagctatcaggttaaacagtaggcatgtgtgttttcatttcattatgcttttaactgtgcatatgatatgaccagatacttcaggttcctggtgccttgacttccctgcaaggatgtactatgacctggaattatgagcttaaagaaagcctttctacgttgttttattttgtcaacttattttgtcacagcaacagaaatgaaactaggacacactccttatataagcccttacccaggataacctggaaatataaacatttgaaggactttcctttagggaatacacaggcagtgccaaagacttgtcttgttagctcagagcctttctattcttagcagaaagttagaaggtgaaagtgatacgttagaataacggcttgagtctgaacacagcaccccaggacaaaatagttgcacatgtaagagatttattgggaggggggcaaggaaagtggcagaagaaagagaaggggagagagagagacagagagagacagagagagagagagaggcattactcatatatatatatatatatatatatatatatatatatatatatatatatatggttatgtggtcacagataaaggtgggaggtgagcccaatggattctgggaatatggtggccgttgtcttggcaacagttgtgaaggttgcactgtcgcctatgtgatttcaaaggtttcagtggtcctgatgccaaaagaaaacaggttctagggacatgcccaagagacaagagtgatcaaatatggctgagaccacggaagatgtgacagtaacatgagtagagatgaccaacagggcaaaatgacttctcccatctctgctttgtgcccagaaaaattaagttgaggcataaagatatttatcatgggaaccttttaaaggtctaattagcatttactatacaccaaggttgcttactgcaaagaaatgtcacaaaagagcagaactataacagatgacaaagaaaggtctcataatccaaactggaggaaatggtatatgatcaacaactagctgcagtgatgggggtaaatgattttgattgcctttgaatggaaaaaagttacgaggcagttaacacattaaactagttgttttgcagatctctacaaataggttgaataaaagaaaccttgaaataactcaaccatcaagctcataaaacccaaatctgctttaatggagtcagagctttaatgcattttgatagcctcattggaaattaagactgagattatatcataaagaagtaaaggctgtgctgaaatttattcacacagccctgtcaatgtttctcagtgtctttagcccggcctctgaataatttgttgtactatgtttcctaaatgtagcatgtgaatatatctgcctggtgatttgcattttgtctttgtttgccaaagagagagtgagatgtagaaagaaaaagagagagaggaagggaaactacaacaaaatatgtcagaattttgctttggcaatgggtctcaggatatgtgaggaatcacaaggaagcaatttggtcataatgcctgtcaaagtctggagtatatattattttctgtgaacaattcattccactggggatatactccagggtactcctacaactgtgcatgttgtacctttgctgtataaaccttgtccacacattgcttcatattttgtaacttgtgtgttctgtaatagatgtaaaaatgaaaagatatctaagtgattacagattgtacaaacttacttgtgtaaacttttaatctcaatccaaggtttctacctggccttgagcattcagtttccagataaaacacgcacacaacctttctttttataataaggcttacttatcactagaccttggccgatatctactctctatgctgttagaatatacattcctatcaataaccctgagttattacttactatgggctagtcttaactctaattagctagtcttcagggacacagtgttttggttgatttaacccatggaggcttcttccttcttcaacttcttcccctcctggtcctccttagatccccaaatctgggaatcctaaactgcacctatgtctcatctgcccagccattggctgtcagcatctttattcaccaatcccaaataacttgtggggaaggccacatgttgtcacttgggtctacaagcagattcttgggagcccaaatttagcattataatataagcaacattaggctgacttacgaaacttactactgtccattatagaacaatgaatgttatggagcagcctcttcagacaccgtatctcccactgatttgcaaatggtgatcatccaactttccattctctgtaactgctggatcagaaggcaaggaaatttaataatcctcctcaaccaggcaaagagttaatgtaggtcatggacacaagggggatgccagggaataatgagaaaacttccaaaagagttcttacactcttttgtttattcatgtgaatcaaggtatgtacatagaaccatgcacatgtgaatggcaatttatcaggctatctggctcatgagctcctagagagtctatctctactgactaaattattgtctgaaaactgggatcataactatatttagcatttctcaattatccatgggttctaagaacttgaactcaggtttccttcccactgagccatccatctagtcccaattattgcatttggatgtgttcatggttcatcagcttctgctagatttgcctctgcctcacttactgcatgatttgactataattttaccatactttggagcagacctgagtatcttcatctggggtgcatctttctccctctttgttctggtggccagtgcagtagggacaaagtgcaccgcagttacctcatcccagttgagaattctgaatacatccctgagagtacacctccctttgtctcaggctttactttagtggatatttcatgaaataaatatgtgatttcttccagtgtagggacaaaggggactctcagctttagcaatttcagcttttcagatgctcagggtccaccgtagttggatagctttgttatattttatatttgatatgagccatattttacaaatatataagttctaattgttagtgcaattttgtgttttctctaatcatttgataaaaaaaagaatgagtcccatatacagtttccaaacccagacactattgtagataccaacaagtgcttggtgacaggagcctgatatagctgtcttctgagaggctctgccagagcctgacaaatacagaggtggatgcacttagtcaaccattggaccccaatggaggagctagagaaaggacccaaggagctaaagggatttgcaactcaactcccatggactaaaccaccaaacacagagcacacatggagggacccatggctccagccacatatatagcagaggatgggcttgtcagccaccaatgagaggtgaggcccttggtcctgtgaatgctcagtgtcccagtttaggggaatgtcagaacagggaagctggagtgggtgggttggcgagccagggaatgggtgatggatagggggttttctgaggggaaaccagaaaaggggataacatttgacatgtaaataaagtatctaattaaaaaaaaaaaagaatgcagatcacaaaaactgaagaaatataaatgctacactgttgctccacaatcataagtacagctcctgacagaaaggcttatccccctttgcatgcagtgattcaatcttggaccttaaagatactgaacaggcagagaattatttgaatgcagggcactagcatcacatgagttttcctaccattcttataatattcccctggcatctctaggtctattgctcccatttaacagagaagaaaaccaatgcagagagaggctaactaaccttgaccatgtttaatgccatagagtatatatatatgtgtgtgtgtgtgtgtgtgtgtgtgtgtgtaaatatctctttctgtgtatgtatgtataaatctgtgtgtgtctgtctgtctctgtgtgtgtacatatgcatttgttcctcgtgatatattgcacattaacttttggttctagtactcttgaagggaagatacctatcaagatgtgtaaacaatgtaagcagaagtctacttagcaacgttaagtaaaacaaagttgtgaaagaaattttgtcagctgcctcaagttaggaggcattcttgtgcgtaatttgttgtgaattttaaagacatttttggtaatatttataagttatatatattcatgtgataaggcattccttttcaccacccaaatcatggtagactagatcttccttttatggcagttctttcatgttactctcaaaaagggatgtttgttaaaatcttggcccaacaaaccatgaagagcaagccagaaagcaacattcctccatggcctctgcttcagttcttgtcttgagtccatgttcctactacatttcaggatacactgtaaactctaaattgaaataaatcctttcctccacaagttacattttataaatattttctaacagcagtagaaagataaaccaaccccccacaaacgctatactgaggagttggatacagaattctatgacttattgtatagctagcctagtaggctcccagaaacttagaatacccaagatacaatttgcaaacacaagaaaatcaagaacaaagaccaaagtatggatacttcattcctccttagaatagggaacaaaatagggcgttatagagacaaagtttggagctaagatgaaaggatggaccatccagagtctacccaacccgtggatcaatcccataatcagcaaccaaacccagacactattgcatatgacagcaagattttgctgaaaggaccctgacatagctgtctcgagtgaggctatgccagtgcctggcaaatacagaagtatttgtacagtatagatacagtatagatcacagtcttctataggatagtacacagggcccccaatggaggagctagagaaagtacccaaggagctgaagggatctgcaaccctataggtggaacaacaatatgaactaaccagtaccccccggagctcttgtctctagctgcatatgtagcagaagatggcctagtcagccatcaaatggaagataggccccttggtcttgcaaactttatatgccccagtacaggggaacaccagggccaagaagtgggagtgggtgggtaggggggcaggtctcggggaggtataagggactttcaggatagcatttgaaatgtaaataaagaaaatatctattaaaaaataaaaataaaacgacttaaaaaataaagtggaagatgagtaaagaaaatatccagcattgtattctggtctctacagacactatgcatacacacatgtgaatgcatgaatgcacacatgcacacacacatacaaaaaaaaaaaaaaaagaaagaaaagtcagagaaagagtatgctacattaagtggtcattggtcaagctatcactcagaattgtttgtttaagcttggaaaagatgttaagtttgagcagaacctcagtgtttctcatacttgacacagttttgtgtgaacaagtttacccagtgttaatcctctagattatatctgctgcctcctgatccctgtgatgtttgcagagaagagcagtagagagcataattaatgcctgtggaggaagcattgttgcaagcaaatgcaaaagactgatcaattctcagttctagggtatatttcttatcttgttttactgttgctttagtcgtgtttaaaaattcccaactataattttgtttataagtaccaaatgaaattcaggatacagtaagcaacagttttccactctaccataaaactgttaatattcagttactatttcaaatccaatgtaagattattattacttttatgttattctaaataaatagcttcctgttgatgtgccaaaaaacatggaaatgaaaataattcttttcctttcttggcggagtaaattcactgactatgtatgggtcaatttagaacctcagacagtatgccaacagcagcagaaatacacatgtgacatttatgtgtaagtgaaatggcagtcttgagcattttacttcaggttatgtggactctccactagtggtagagaatacagcttctgctgctgaacagcactgaacactaggcagtataaagtcttttgattctaaaacaaatgtctttgaaatttttgcacttgcaaagttgaatccccttaggcatttttgggtactggaataggctctcatgtagcccagatggacctccaattcattaatttagaggaagatgatggtgactttctgatgctcatgtgtccatctcttgagtgctggtgttataaaagtgtgtcaccatgatggaattttggtactagggattaaacacagagcttttttctcatctgagctacataagaaagcttcatgtgtagaaaataacatgtgatacttcattgacaaaaagaggcaaaaagcattctttactgttgagtttatacagtggggctctttgtattgagatttcaaagtaattcagtgcacactgttcattctaaaaatctgttgtcttaatcagtgtagactctataaactaaaaaaagcagaaatttatttctcctgtgtttagagtcaggaagaacaagataaatttataaatccatcatctgctgaggacttactttcgaatctataattagttcttctctcctctcctaagacattgtatggtgggggtagtgggggcagggaagagaaagagaagggaagaaagcaaaagaaattagaaaggaaggtatctccccttttgatcttgaacaacacaaatatcgttttggtggcatcagagatgggagcttccagccataacaaattgacaattatatatatatatgacagtgtagattattaagtgtttttactttcaatttctcaaatccagggagtcttctacttagactgaagtacaaggaaagtggtaagcattgttttgaagccatgtttagggtctggtcctgccagtggctagttccacatagtacttcctgtaaggggtctgaaaatttgttaagattgtgtgaagccttcacaggccggcataaaccttttcctcttctcacaataaatgccctaatttcttatggtccattgcttcaacaaagtcacataattaattctcatacaaggagtaaacctccagaaactaatatatttcccaatgccagcttacctcataccatgttacagtttcaatgtattaattttagggacccacaagcatcccatgatcaactttccctaaatcatattttgattccaggaaataaaaaatagtattttacatattcatcatttctaccttccccttcttatcattctccttctcttcttcttcctctcttcctcttcctccactttttgaggtataggtttcctattttgctgactcaaacttagcatctatcctagcctgctctggaactttaccttgtcctgctttggaccctccagtgctagactgcagctgtgaaactcttttcatggttccatagtttattccaccaagaatctttaactctactcaataaatgagataatagagatcaaaaaaaaaaaaaaagattctgagaggaaaaatggaacctgaaaaagaaaaaaaaacaatcataggtaatttttagtaatttcctcttcaaagttcagtggcttcctactccattatgacatcaagtatccagtaacattacccagaattttcctaacaaaagacaggtaatttaaaagtaaagtagaatatttgtagactcattggtaaaatggttacacattcacacatctatcttcttgtgtgtgtgtagtttcaaagaaatagatctgtgatattagcttcccatacacttcaaaggctaacattactttcagcagttagaaagatacctttcctcctccttcctctgtctctgtctccctgtctctatctctctgtgtctctgtcttagtctgtctctccctctcccctttcctctctccccctcccctctctctctgcatgtgcagatgtgtattcctgtttcatgatgggattgcaccagatataaacactcaggccactcagatacagccaagtgcagatctttattttagcttgcttagagtcagtgaagaaatttggaatgtaagtacagctcaaaacatttaaaacaagagacttttaaaggcaaaaataacttatgctagtatctctctctgtagctccatgtaagaggtgacaaagttgttgcaaaggtttcacaagcagtttaacaagacctagaataatttagctggagtgttttgtcctcaggttactaaaatagagttaggtaattttccatgtgtttttccatcaagatcaagttatagctgtactttctggcaatttccaggaaatttcctgccactgtgacctctcaatattcacgtgatgacctgaatttctcatttggcattactgactgctgccgagctcttttctcaggacaccagcacgaaaggctcagtgacatccacgcccacccccacaatcccaattcacccaaggatgctaaattattcaattatattattcagatatatattttaaatgttcttcacacatactgccagcagtctggtaaatgaaaagtgcccagacgcttacttctccatgctcacacagtcccttggcctgttctcatggcctcagtttatatcataggcttaaatctgcctggacaaactcatgtgttgttacaatttcatgccactgcttccagttctcttattctggttctagccatatgcctctttgctaaagctatctaaggttttcatttctatcctgtctcaatatgatttttactactgtcattaaattcaattcagttataataaatctatattgtgttcaaccttgtcagaagtttgtttcctattaagtttatgacatacagaattcccacaagcctctacagtttctcccacgaggtctcagaagatatggatacagctacaggatgctgccaaattgtgatatgagaaccactgaagaatgtagtggaaaaaactggataccctgagtatgacttatattgtctaaaacaagtaagacatttctcatgttacatgtatccattccacagagaaaagaccctgcgtcatctgggcctgaaagccagactgactgcccaagttgccatggaaccatggagcccacagagaactgttgactagtggactctgtcatttttttttaaataatataactgctaaatttttgtttattccccagacttctgactacattaacagctagaaaaaactttcacagatgtaatctcttatatccttacttaaactctgttttcattaactaaatacttcatatttcctcttcttgctgtgccactgttatattacctgagttcctataaatttgcctaactctaataaaatattccactatatgatccaacttttccaactttttatacttgttccttttgctccaaaaagggctaatcttaaagactgttcacattgctaagtcttttatacttataaactacagaaaatccactcagatctacttctcatggaccaaatagtacatccagataagtacaaccacccaaagttcccacttgctacctattccaaagattgcaattcttttgagttcaaatatacaccttaataaaaatttttctttatcccaaatgtacttaatcttattctctacctataataatgtgttccaacatcttgtaaactccaggcacttgctacattcaggacaggtcaggtttccaggtttttaatttggttttcactcacttagagccagacttcaaggactgcaataaacagccacgggtttggtcttaatttatcagcaaacctggcatcagaaattacttcctttactatggaaatgttttctgtgtcctttctttttcttttcttttctcccccaacaccccactgtattccaagaatctcttttataactgcaaaaagagttttttgttttctttatggggggaatcagtgcttgaacattgatcatttcctagatctacctgcccaataatgatgagtaacagccaaaataaaaatgagagcaggatagaagagattttgataagctttgttttgtgattctaccaaaggctgacatcaaatctatacagcttctgctgagatccaaatctcaggatagtaaaagaaaaaagacatgtgctatctgcttcaacactactttcccattgagtcttttatctgctccaacattctcagtcatgggaattgagcttggaaggaaactgcttacctgactgataagttggggcttatctactgctgtagacactgatgcatggacctcagcctggaaagttctgggattaaatactataaaacatagtcagaacaactttctcatcatcatttgacccccacaataccagcaccaggtataaccttaccttggctaatcatagttgaaaaagactaagaaaccattctaaagtcatatctagcaggaagaatatgcaagtgaaacataaccatcatagataccatcaaggaagaaagagcaagtactactctcccacaccttgtgaccctttccttgccttcttgataggctgctagcatggagcagcagactcctccatgccaactctgtgcttctctgtagcactctacactgagaattaagagctatgaggtgagctgttggaatggtagaaattccaagttgcaaagacattccagggcccttaaacctgaatcaacagcaagagtatatcatagaactcctgacccttgacttatcattgaaagcagtgtacaattctttcatatatcacatattaaaattggaagctaaagcagaaggattggaggtctgagtccaacctggataaagaataagacattctttcccaaatgccatcaaaatatttaacttctgtaaatgagttcccaggttatgacatttctggttacaataatcaaataaggtattttatgagtagtatcagacaaatgcagaatatcattctattgtctactgagaaggtatttgttatgagtctacaagaatttgtctcatgcaccttacagtgcattgacaggaagatgcacagtaattgatagaagataaatactagatagagatatatggcaaacatttttatacatacacaaattcatatataatatttttcacttgtcaagtggcaataagttctacatatggttaggcttgggaatagagttagcaggatcacaatatggagtcatttccatgcatatatacatgtgaactggtcaacacgcttgtccagccttctttctcagtttcactatctactttgtggtcttaccttagacacatgaattagttctcacctttaattgggcctagctcttatagaaatgccatatcttaccctagatttaataacagatggccaagttctgctgtcaactttcaaaaaatagctctctgctttacgtggaagaaagctttctatctcttttctcagaatggcaaaggcattctttcattagcggagtgtgaaaagatgaatttttctaaataggtatttcagtcttgccaagggtacactgtatggcagagtttcacacatattggagttacagcttcattgtagatatggaaacaaacttgaaacaggcttttcaacagtcactctaccattccttatcctccctacaggaggagctacaaaaacacaacagcaatggaaagctttggtgaggccatctgtgatcgataatttaatgcctctagcttttatgaataactagtttgttgattatattattcaaaacaatgggaaacaaattcatacatctactttgccattggttgatgttgtggtttgaatatcccaccataatcttgcatttttgtatgatttgcaagcaaagtaactaatacaggcatattgacaacaaagttcactttattcagactttctttggggtttatttttttttttaatgacagtgagtgtgatggcaagctgaggtcataaaagtaaagtagaggagcaagctgcacaagcatgaatcaggcaaaagcatgaatgttagatgctgggccagggatgggaagtactgagaaaataccagatttcctggaggatttttaataagataatcactggagtgagcacatatgccattgtggcatagttattctatctgaatagtcaggggttagggtgcttcttaggggtaaagaatgagcatgtgtgtattagtgttctcatatgctgcagcatagttatcattaaccaatccctatctatagtcacaatcaaaacaccctgatagctgtctgtacatccttcataatttcatatcctgataaatccactgtacattataaatgaactcaacatagcacaagtagctcaacaagagtgtgtcatcagtttttctttgtggctggtagcaatgtcatttcacttatgctgtacaccataccaggaccattctacgtatcattccaggatttccagattctaaaaaaatcagttagcacttttatactatttccaaattgagtcatattaatgtatagcagtgtcagtcaagacaaataagatatattgtttcttgaaattctttcatttttccttactttaaaggctaaaactagtgcaatggactttgttatgtaccaatacttcctggggaattgcaacacatgtctattcatttcagataaggaataaaatgatgagtatcaacctaggaaccccaaaaccaaaacacaaaggagatgtatttgccagaaagggacaaaaggtaggaaataagagacagacaagagatggaagatgagggacaagtggatgagtacaaagaggaaggatatttgtcccagaggacaaaagactgcctcttgatagagagaagatagacatggcccatgggaaaatggcaatttagaaaggtacaggagtaacccattttagaatgagatgctgaattgtaattggccatgcttatcatgtaagtcaaagggaacttttaattcatggatttcaatacttgatatgcggactttagtagtcagcctaagacaagaaagtgccaaataagggaatagaccttggggactaactataggaatgtaatttaaaggtttttaccagggcagaaggaatgagagagaagggcaaaacctgccataggcttgtttttcccatgttctagatagctagagtcctttcatggaagccacaacagaccaaagtatggataccaccaacatccatcagggagttgatgatgaaccagggagttttgttgaattgttttcagaaactgttgtgtccagattgcaaaaatgccaaagagaccaccaagaaccacaactccaatgtaagcacataatggttttaattcaagctctagcttaggccacgctaccttcttcatggaagaggaaggaaagtgacccccagctctatgtgaaggggggactataaaagaaaaaaatgcaagtgggggtttctaagccttggcattacatgagagtgtaaagaggaatgttgatctctttccagagcccaggtgtggtggccacatcaccccaaggacagcagacagcttcctagacagtaactttatccaagaacagcaacttaaaatagagtttggaggacaagatagaatctctccagctatttttaagtctcttcactggccgtgtttctctaagggcaagttaatttagaatggagttttaaatacaaaatggagtttattctgctaactcagcccttcagaatctgcatgaagagttacttacaggagcagaaatgactgagatagctgcatcatcaagacttaccccagcgtggatggtagctcatgggtaaaagctgggaaacctggaaccttctgtacagctttcaggcagtgcaataggttggacaatgtgctttccacactctttagtttgtctaaatctcattcaggcagcttggctggtttctgttctctggtctaagtctcatttgcagcttggctctactcttctgagagtgattctcagctgttattgtctcagcttgttactcaagcagggagtagccaagtgactctagtcagtttcagggaagtcttgaagctttatttgttcaccttcatgcttaagtagtttcttgcaggattacacaatggaatgtttcaatctgagaaaaattatttacacaacaaaggggaaccaatcatctcctttcaataaccacaaatctataattaattacctacacagccatcaaataaggagtgtctggtcagcctaaatcagtgaaagacctgtgaaactgcaacataattggtacatttctctgcagttaaaatgatgaaagaggaattcatcactaacaagacaaaaacagacaaaaatcttgaactcagagagctccctgttttgagtttcctttttttttttcataaaatgtaatattttacattcttgatagtcatcaaaagcaggccaattccttgcacataatttcttcatttccattatctgaaatcctgatgcaaacccattttatcacatattccagaagaatagtctagaacttggaagctggagtcgggtattcatttcagctttaaatctgtgttttgcatgttaattaccgcctcctattttaaatttatcttatcaaaaacgagaaaattcctttatgattagctctgaccttcttgtacttccttcctttatttttctctcttggagagagaggactttgtatggcatttacaaactgttgattttttaaattttgtttgttttgttttgttttttccagacagggtttctctgtatagccctggctgtcctggaactcacactgtagaatcgactagtcttgaacttggaaatcaacctgcctctacctcccaggtgctgggataaactgttgattttcaaatgcctttcatggggcttcaaggaatctgtctctattttagaatatacaatatactttaacacaattgtattttcacaagtatgtcccttgaggaatttttcactgtctctctgtccctgcccatgtccctgtctgtctctttatttctatctgagattctttctctctctctctctctccctccttccctcccctttcccagtagttgtctctctgtctgtttgtctctgtatctttctctgtccctctttctctctctttctctctctctctctctctctctctctctctctctctctctctctctctctctctctgtgggtgtgttgggagggagatattcttcctctatgtatctcaaaatcattttccttgttgtttcctttgaccattacagtgaaatcagatatatactatttggtgtctgcgcatgatcaggaagactatctatagattactaaagctgacaaggacaattatgatgaaacacacatctttgagtaatagctgacagactatcattgtaatatagacaacaatcttggcaagctcaattggattagttgtataacataaacacactaacttacacttaattatgttctttaaaatggtttagatcttaaattttattatggatatttgattctgatgttttcaaagcttaggatcggagctcatctacagaaaaataataattgtaaaataataattcatgtagatgattggaacaggtcttgtactgtgtttgtgtgtttgtgtgtgtgtttacttatgaagcatgtatatgtatgtagtatatgtggatatatgtgcatgggtgagtttgcctgagcacatacagagcccagatgacatattcatgtgttctcttctatctcttaaccactcactgccttggtcctttgagcaggccctcttgctgaactataaatgtttggattttgtctcggctgatagcaaatctcagcaactctactatatcttctccctttaataatgggattatgtgtatgcatggaaccattccatgctcatcatatggatgctagaatctgtactatgtcctccatgcttgtttaaaaagtattcattgtttataagatttactttttaaaattaaaatataattttatcatatcctacttcacttttctttctccataccattgcttgtacttcccaatttctctttctcaaatgtacaacctctttttctataaattgtttatatatattcatatatagactgtatatacttatacacatatgcatacacactcacacactcacacacacacacacacacacacacacacacacacacacatcttgttcagtctgaacaatgttgtctgtattatctggttatctgatttcaggactgaccatttgatagtggataaccacctgaaggtttcttttgctctcaacattgcttagtttcctgttcttcctaaactttttccttcaatattaacatgtatattggtgttgtccttgtttgggttttatttaggcagccatatgggtaagacttcctggttgtaattcccttgatattcttaagagactaaatatcacaggagaagttctgttcctctgactcttacagtctttcatctatctctgccatattggtccctgagtcttaggtgcgggagtcctgttgaggatgtatgtatcagttggcactgggcattctactgttacttgttctctacattttcatcagttgtggttttctgtgatagtttctttgtttcaaaaaatcgtttccttgatgaggggtgaggacttcacttatctgtgcacataagcagaaatatttagaatgcagttaaaggttatgctgatgtagtaaagtggtggttttatgttctctcccaaggtccttgaccacactagacctgggtagtgggtgaagttaagtttaaacatttttaaccactgagccatcttttcagaccatgtgtgacttttaaaaacaatcatcaatgacaaatgaacagaaaaattaactacacatatacctagaatgtgatgattcatttttgtaaaacttgatgacccatcagagattgggaactacaaaaatcaggatggttcttggattaggacagacttggagctgaactttggaataatttctaagtactaagtgatgaaagttttaaagatagatttccttatagttttcccatcctgcccaaaatttttcttttaatttttaaaatggtggtgataatgttatgtattttgtgttataactggcctcaaataagatttgcaattatttcagtaaaacacctttccttccaggaggaggttgtcaggtatcttacagttcacatgagcataaacttgtgggaaactggaacatcatgatgttattaacttttaaatcttcaggtgtcataccctccagattcctttattcataaaattcagctaggcctgatggtaggcagaagcacatccaaaagtatagtatttggtgcctatgaaaaattgtaatgcctgggccatcactatattagaataatgtcaggggacttagggcctttgttttattttgtcttgttttgttgttactgttgacattctccaaaagcctcagtggataagcatgcatacttctttttctatggcttggtactgcataactcactgggtttctttttgtcttcagacatttataggaaacatgaatgctaacagtgtagttcaccacaagctactgcacgctgtgagagcccgctttgttcgctttgtgcccttggaatggaatccaaacggaaagattggcatgagagtggaggtctatggatgcttctacagtaagtactcacaaggatcaagtcacacaacataagatggctacgtaataccagattatttatattgaaaattaaaacgtgtgtctgtttgcacatgggtatgtgtggatttgtgtgcttttgtgtgagtttgtgtatatgttcacatgtgtaagtgaaaaaagtggctaagcaaaaacctccaatatttcccaagagcatcacatcatttgacctagaacttttcacttgatcagaaatattcagctgagcctttactggctgagcatgacccacaaagattttgaaatctccatttccagaacagtggttgtccaccttcataatgctgtaatcctttaatatagttcctcacggtgtggtgacctccaaccataaaattattttgtcattatttcataactctaattctgctaccactattaataagaatgtcaatatgtaatatgtagggtatcttatatgtgatgtctatgaaaggctcatttgacctccaaaatggtcatgaccataggttgagaaatcactgtgctagaaatgagtcagtcaagaaggcagctattttaagtttctcctgaaggcataaagatgaacatgtatactgtgtcattatgaattgattttcttctttaattcagtggcattcacctgctgagtttataatatccagtgtcacctaaggagtaaatacacttagtcaacacactttaaaaaatcattagttatattagttcagtttcctatttctgagataaagtaccttgaaaagcatttttagggagaaagatgttaattatttcagctcacaatctcaggttacagtccatcattgccaggcaatcaaggtggcaaaaagcataggaggctaatcacatcccatcgacatctaagagcaaagtatgatgataacatgctcacatggctcctgtccatccatcatacaatgcttaggaagtggtaacactcagagtgggcatgtttttctactattcaaggtaattctcccatagtcatgcccacaagccaacatattctagagaatcacttactgacattgccttcatggaacattccttgtgttcatgctggcaattaaacttactagaacagtccattgaattagtactactttgggtcacagagggactcaaatgtgcctacttctgttcaacaaagccagcataaaatagtacttgcctcagaagcattcaacgtacttcataaaagtgcatttgctttcctgttgtcctacacactaaattaagaactctgagaatgaaaacacaaaactctcaagcattaatggctccttgggcaaactcttggctacagtggatatgtctgagaagtaaagtttaaggggaggagattgactgtggaaccaactgcctttatcatggacaaacactttttgaaagagtatgatctatgaaggaagcattgacagcctatcaagaaagcactttgtcacctgtaagttcaaggaggcctttaattccccctgtacctcattgctcaatgaggaacctttgtcattgctgggaggcttctgtggctctcattggcaatgtttgcttacttgtatgttaagaaactttcaggatgaaaaacactgaagaaaaattatttgttctttataaatccatctctttgggcctaataatttcaagtagtgtgtgtgtgtgtgtgtgtgtgtgtgtgtgtgtgtgtgtatcagcctctgttttctcatgcaatcatattgagctcagatcatcaagcatggcagcaaggatatgtacccagtgaggagtcatttgctaaccctggtgtaggatttttattagtctttcaatgtctctacctttagttttacccaagaatgatattgatcattatttcttgtaccttttgtatgccaagcccaaaggatcatgattttagttagatcacagctgttactttagttgtgtatactggtatatacagcattgcctgtagatgtagagacaagtatgaagaggacagtggtcaacttcaactattctcaaacaggtactgcctaccttgccattgcgagacaaagcctgatgctggactgtggcttgaaaaatggaccaggccggctaactggccagttaccccagagatctgcctgattcttccttcctagtgctggacttatagcacataccacacttagatatttttacacagaatctggggatcaaaataatgccctgttgtttgaagggaaaacactcaaaaataagtataatggttatagaaggaggtttcaacttcatcctctactctttcatatttaagctggcacatgcatgtacatgcacccatacaaacacacacacacacacacacacacacacacacacacacacacacacacattcagagagagagagagagagagggagacagacaaacagacagagacagacagacagtgagacagagagtctttgaactcagtgtattcattttcaatcttagcacccatgtgataaataagcaggggtgttgatatactgagggagtaggataaattgaaagggggatgaggagtctatgaaattttcaaataataaataaaaatattatttagaggaaagcaacccatcattttcccccttttcagctccctttctctcagggcttagcttcaggtctgttaatttttctgtgtatggctgatggctgctatagtcaccagatccactaactgtgaagaacctttacatatgtatcagttccaaaactctctgccagcctggtttatggaaatattaatatacaattgcttacattttgcttccatgaaaattttctaaatatatccagcttaatatagatgaaaaaatcttgtctccccacagtttgcaggtcttcttctcaaaattcattctgtctcagtcataggtgtctacaccctgcctatttgtgtaggacactgaaagggaatttaatacctttcttccctctaaggtcttgtctagtaacccacccacaattcaaagtgtctctacaagttcttttctctagagatgtatagggccatgaaaggcagcctggtttctggctgagttaagatagatccatcccataatcagccaccaaacccagacactatttcatattccagcaagattttgctgaagtgacactgatatagctgtctcctgtgaggctatgtcagtgccaggcaaatacagaagtggatgctcacagtcatctataggattgaacacagggcccccagtcgaggagctagagaaagtacccaaggagctgaaggggtctgcaaccctataggtggaacaacaatatgaactaaccagtacccccagagctcatgtctctagttgcatatgtagcagaagatgacctagttggccatcattgggacgagaggcccctaggtacttgcaaactttatattcctcagtacaggggaacaccagggccaagaagtgggagtaagtgggtaggggagcagggcagggggaggatatagggaactttcagggtagcatttaaaatgtaaataaagaaaatatctaataaaattaaaaaaacaacaacaacaataggatggacgataggtgttttgccatgctcctggacaccaggctcctggacgaggtcacagctcttcataggtttatggccatcagtcatataagggcaatgtcctaagcccctccaaaggtagacgacttgacctttggtcacatagcctcaagacagatctccattttaatgacgaacctaaagacctggaggtttacccaattaaacttttcttcctagacactcctccctgcaaaaggtgtttatcctcaggcctgccctgagaaagtggggtgctgttttactcatcgccactctctgccatgataataaatgccttaaaaccatggactgtctcttctcatcgggatgcgccatgggagcaatagaacagtcctttccctaaagagccagatgtctaatttcttgcagaaggtcctctcagtgctcccaaccaagacctccaccaagtcaaaccacccctgaacaaaccaaggactttctcctcccctgaggacccagccggagttttctcttcttttccccttcagccctgggcaagatccatcctgcgctgggggtgggtgggtgggggactccattctcaactcttctgaggcttccagcagcacctgggggctcaagagcctgagaaccagacagtcccggcttccctgcaggcccgtgaacccctgagccagctccagcagttgcctgggacctcaaactgtgctccaccatctctggagcggtgtctagcatagtcaaaacttatccctcctcatctctctgatcctggtttctcccatctctacttttctctcctccactggcccccaattttatctttctttcctgtgctctggctggacagatctctttgttcctttactatgccaaaacttcattacccttggatctgtgccagtctttagacaaatatttcccctagatatttgtcaatgtgattgtcaatgtaatctgagacagtgacattctcaaatgtgtgcattctaaatgccccttaaaatcacctatgctacttccagtattcatgttattaatgtataatgccggagtatacttcatttactatacaatgccacaaaccataactattggtttatgctatgttgatagctatcttcttctctagtttcctgcactttcaggtaagttcactattaagtacctgcttttaaaactgcttatttgttagtaggtagagacatgttttgggccagtctcattgtctaagcttagccaggatggttcttatagaattaataatattaaaaatattaacttttcattaataaaggcatttcagtattttaagggtattacttttgtttctgtgtgctcataaatcttaaatttgtccacagtatattgacaaaaattggtggaaatttataactttaggaagtacctcagttggtagactgcatgcttagctatgagtttcatttccagaacctccttaacctagcctgttggcttactcctgaggtcccaactaaatgaaataggtctaagactttgagaggatcacattcattctcaattacttggcatattgttctaaactatctaaagaatgagccacgacagtgatacttttgttagaatgagtgaccttattaagtaaataacaggctaaagtaaacgaataaatacatgaaaacaatgttgtttccccacagcagttctacttcacaccattcattctgtctcagtcataggcccctatacactgtctattggtatataatactgcaaaggagtttagcacttttcttcaccctaagaccctgtctagtaactcacaggacttagatacatgtgcacatagcaaacaccatcacatttcctcacacaaagttttttgactgaaattgtctggagaagccttcttgaggctggagttcctaatagaaagtggccctagcctaaccaactcttagctttggtgaggtttccgagaaaatcaggtaatagcaataaaggagataacatcatctgcctctctttctatccttcatctatttttctataatttgtcatattttctatattttttatgtttcatattttacttataacctatccatgttttaaattaattatttatttacatttcaaatgttaaccccctattggtccttttttcaatagtactccactgttaagagagtgttgcttaatggtggagtactccctcccctgtgccgttaagagagtgttccccaaccaacccactcattcccacttcacccctctctcatcccccttctctggggcaccaagccttcataggaccaagtgaaccccttaccactgaggttagacaagacagtcctttctagcataagccatggatcaggtgatgtatgctctttgttggtgtgttagtccctctgagctctgaggggattagttaacactgatttttttcctatggagttaacaatccccttcagctccttcagtcataatcctgactttttcaatgggatccccaggctcagtctaatcattggctataaacatctgcatctgttttagtcagatgctggcagagcctcttagaggacagcctttataggcttgtctgcaaacacatcttggcaacagcaatagtgttgtggtttggtgtctaggcctggtatggatgccaaggtaggatggtctctgggtgatctttccttcagtgtctgctcattttttttgtccctgcatttcttttatacagaaacaattttggattaattttatttgaaacgggtgggtgactccatctctcaattggaggccatgtctatctactgaagatggtctcttcaagtgctatcatcccactgttgaacattcctgttattgtcatctccactgggtcctgggagcctcccacatccctgatgtctgggatattctagttgttttccccattccccactccatgcttatgcatatttctattcatactcctgacactctgggcttctctcttgtctcttcctatatgtgaacctgccccccttttcctcccctcccttcctctgcctcctgtggttatttctttcccctttttaagtgtgatttaagcattcacacttggctttcctttctgttaagctgcaaatggtctgtaccatgggtgttctgaacttttttattaatatccacttatcagtgagtacataccatgtatgtccttttgggtgtgtgttacctcatttaggataatattttctagttccatctattttcttgcaaaaatccatgatgtcttagcttttaatagctgagtagtatttcattgtgtaaatgtgccatattttctggtttgatttttctattaagggatatctggattgtttccagcttctggctatcatgaacaaggctgctaataacatagtggaacacatatccttgagatatggtcaagcatcttttgggtatatgctcaagagtggaatatctgggtcttcaggtagaactatttccaattttctgaggtactcaaagttctaactagacaacaaacagatgtcaaagggaaacaaaatagataggaagaaatcaaagtgtcactatttgcagatgatatggtaatatatatatatatatatatatatatatatatatatatatatatatatatatatatatttatacctaaaatttctaccagagatatcctacagttgataaacaatgtcagcagagtaaaaacaaatcagtagctttcctctacacaaagaataaatggtctaagaaagaaattagagaaataacagcctccacaacagtcataaataatataaaatatctaggtgtaatgctaaccaagcatgtgaaagataagtattataagaacttcagattcctgaagaaagaaatcaaagaagatttgatttcttcttcaatggaaagctcactaatcctcatggatcaatagaattaacatagtaaaaatgatcatcttagcaaaagcaaaatgcaatccccatcaaaattttcaactcaattcttcaaagagatagaaagagtaattctcaacttcatattgagtaacaaaaaaccaaggatagtgaaaataattctcaaaaattaatgaaattcttggaaaatcaccatccctgatgtcaagctgtactacagaagaataatgatacaaatcaaatggtatttgtagatagacagacaagtcagtcaatggaataaaattgaagatgcagaaataaacccacatacctatagacacttgatctttggcataggagctaaaaccattcagtgggtgaaaaaagcatactcaacaaatggtgctggtttaactggtagcctgcttataaaagaatactaattgatttatttttatcttcttgtacaaagctaaagtccaagtggatcaaggatctcaacataaagccagatacagtgaatcagacagaagagaaagtgggaaataacctctaacacattggcacagaggaaagtttcctgaagagaacaccaatggttcaggttctaatatcaacaactgacaaatgggacctcaggaaactgaaaagcttctgtaagtcaagggcactgttagtaggacaaaatggcaacatacagtttaggaaaagatctttacacatcttctatccaatatagggctaatatccaaaatgttctaagaactcaagaagttagactctagaaaaccaaataacccaattaaaaaatagtatatatagctaaagagaaaattcttaactgagaaattttgaataactgagaagcacctaaagaaatttccaacattcatagttatcagagaaatgcaaatcaaaacgaagctgagattccaccttacaccaatcagaaaggctaagatcaaaaacttcaggggcagcagatgctggtgagaatgtggagaaatagtaacacttctccattgctgatgggattgcaaactgattcaaccacattggaaatatccatagggtttaaattacttttaaaaataatttatagtcacatttaatttaaaattacctttatcagctatcaagtcaagagctccaaacagacaacaaacatatgttctgagatccctagcactctgcttggataaggccaatttctctcaataattaaacttttaagggacagtgtctctaaagtagcaataaggccataagtagctgaggcaaggtagggtctgaacaacatttgctctcatcttcccttgtggaatacttccatgcatttatatatggaagtatttagtcatgtggaataaaacatttccttggaagaaaaatataatcttttgacagagggttagttttcactgccaaagtcaacaaggaacctatatttttcaaacatacacatgtaagtggcttcagggacatggtttaattgttgccaggagcactagctcctacacacatctccaatcctgtgtccctcacctacacattcactcgtaattttgcctaagaatcacttctttctatttgtttgtaaataagtctctggagctctgccagaagaatgcctgagcaggtgaacaaagcccagttgcaatcaccagcaccatctaaaccttcttttattcctaggatttattcaggaggtggaggcagaatgatcacaagtttaaggtgaacttcagcttcatagtcatttcaaactcatcattggctagatactctgtctcaaaagaaaataccacaaaaatacctactttgaccacaagcaaattactgttgtttatttatcactacttagttgtgataaagagccagaatttaagccagttgtctcaaactctatttctaatgtaactattatgtatttgttcttcagatatttgggtcacactttcaccattcttttttcagttctattcaggtacacaccctgttgctaatttagtagacggtagctgggatttcatattcttggtcctaaaggattttgacatcttctatcaagccatctggagactttaagcttctttaacttttctctggagcttcgatttgaatttctttatgtatgggaagctaattaattttgaaagcattataaattctgataacacataatgatctgccaggctccccagactcattaagaattataaccctccttttatatcccaggatcctccccctacacaagaccttgctcctatctggttaattactttcaagtgctcatccaaaactcatcactttctaagctaaaatcatgtcccctttccccaaacaaattctttatcatcatctctgtttcagctgctttctttgctattgtccttacaatccagagtcagttgtcacagcagcagaagtcatatagttgtaaatttcatctttgggttgctaacatcagtatagtcttatcctgggaatgatgggaggctttgtgcacagccaggtcagccttggaggtatggaagataggaaaacagtgggcagatgtgacacttggaagccccagatcccactttgcaaatctgacaccttatagccagatctagatagtctcaccagatgattgcaagtacttcactcaggatataagaaaacataaatccagatgtacctaattttagatcaacataagggtcttattcttagaaatcactgaaagctccagggagtactgcttagctttcagtctctagctgcatatgtatcagaagatggcctagtcagccatcactggaaagagaggcccattggacttgcaaactttatatgccccagtacaggggaacgccagggccaagaagtgggagtgggtgggtaggggagtggggggtgagggcatggaggacttttgggatagcattggaaatgtaaatgaggaaaatacctaataaaaaaatcactgaaagaactgaggagctaagtgtgaatatttataggtaacagaagtacagtgcacagaaagacttctgtcttaacccatgaccactctgtgatgtttctaatcaattgaaaacctgaatattcctcaaccattgatatatgttaacgcattgtctttgctgctgtctttgggctatggaggtataggagcccaccctagatctgtagaaatatagacttcagaagctgcagggatctgtcaaaggaatgcttatgactagggagagagcacagacagtaagtgtcaccctgcaaacaggaggacctgagtttcttccacaggtcaaatgtttaggaaaatgatgaacaggtttatccacatgtgtaatctcattattgagatatagagtcaggtagacccgctggggactatttggcagcctatgtactagatgtcttagtgaatcccaggctagtgagaaattttgtctcaaaatcccaaagtgaatagcacctgaggaacaacacccaagattaagtcctctaacctgtacaatcagtcctgatgaatgagtgcctcatggataagctgcagccatggctctgaaaatatatttgccttatgctaaccatggaatttaaaagacaacctgccctcatatttggaccaaccactctgcagttagtttccccacagcagtcagggtcatacctgtcagcttgttttaccttcagtttctgtggaagtggtcacctcagtgatgtacgtattgaaatattggctatacaacagaaagcacccatgcatagtcatgtatccacacatagaatctatgcaaaacataaaatcatggaaacttttttttttatttttctgttctgtgtatttgtggtatatatgtgtatacaagcatatacatgtgtgtgtgtgtgtgtgtgtgttgtgtgtgtatgtttgtggctgtgtgtttgaccatgtgaagatcagtggtagacattttatttttattatatcaggtttctgagtggaccccgaattcactaaattcacttggaggtaaacagcatgtccccagatcctttgcctatgcctctacagctctgagattacaggctacatggtgtcacctgttgttgttgttattgttgttgttttgtttgggggtggtggtggcatggaatgtgtgtgtgtatgcttgtgtatagtgtagtatgatatgtaggtgtgtacatattctattatgcgtgtggaagccagagaaaaacatcaagtctcctgtttcatcactgtttcttgttaccccacgaaaagacctcttaatgagcacagctctgggctgccagactatgccggggcctagcaaacacagaagtggatgctcacagtcagctattggatggatcacagggctcccaatggaggagctagagaaagtacccaaggagctaaagggatcttcaaccctataggtggaacaacattatgaactaaccagtacccctgagctcttgactctagctgcatatgtatcaaaagatggcctagtcggccatcactggaaagagaggcccattggacacgcagactttgtgtgccccggtacaggggaacgccagggccaaagggggggagtgggagggtatgagagtgggggtgggtgggtaagggggacttttggtatagcattggaaatgtaaatgagctaaatacctaataaaaaaaaaataaaaaaaaaaataaaaaaaaaaagaatcctcatgacctgcagagcactgtaataacaagcaaatgccttgactcccttatatttattattttcttaatgtagtttctagagattctgaaccttttgcttgggaagcaaatgctctccctcagggagtcatccttagctttttaaatagtaatgagagcgctgaactcaggtccttactgtactgagcccaccatctcccaggtccatggcaacgtttctgtacctactgtcacaaaagggaaaactagaagctttctgctcaaattttgaaactgctgtttaaacagcaagtagccttcctggagtatctgcatgctgcatctgagaagaacactgaaaatggtgtagaccagagacacagctaaaatctgcatgatgctatttcacaggccttcttccctattctcagcctttgctacaatcatccctttccttctggtgacctgtaaaaaaaatacttatgaaatattgccctcttgatgagacctttgtccatacctaaatgagtgcccatgtctcacgactatgcaagctgttcttttcatttgaagtcttccagtttgcctcactatgtcctactccactccttttgttaccgactagttatttatatcgtattgctttactcccaccagacccttcggagaaatgaattgtgtgaagcatcttaacacttccctttattgcataacattccatcattgtgattcgcttatatccacaatgttgtgtgtgattgtctagatggcttgacccattgtatttatcgtatttgcatcagagaaatgaaaccaaaattaatttagactattacctacatgggattgaaaaggtttagatggtaatgaacttgaaatgcaagcatgagcacccagtacctaggacccaggtgagggataaccttggctaaaataaactgcatatgatgatatatgttgtgggggggcataaacaaaaaaaaatctctggatcatgctagcctacttccagagtaaattgttccttaaaaaaaaaaaaaaaactttccctggcatccaaatgttcttgtgcacacacactgatacacacacacacacacacacacacacacacacacacacacacacactgagagtaagaaataataaactcaatacattccatgaattcagggataaataaaagaagaaaaatctttcttaggagttctctaacatgattttggtatgtttttgtaatttgtgaaaagtttaatgacactgtaaactttaactatattcacagatatatggagattgttcaaaaatatggagaaaaccctcattaagagaaactcgtttgttcttcttagcaagataagtcctagtgttcaatacccacatgatataaaccaggctggttggtacacacctgaaacccctacactcagaaggtagaagcaaaaggaccagaaattcaatgatgtcctcagctccacaacaagtttgaggccatcctggtctactggagactcctttgcaggaaaataagactggaatctagagttttagtttttctctgttataattttttaaaatgttgtcttgatccttttcctatccatttcacctccttatcaaatacagaaagttctgaaattttctttgaagagctgtctttaagcttttacagtttactaatcaaacttcctttgtgctgagggttcatctccggtagtcagagttgttgattaagcctggacaaatcagagaataggtgtgtggtgggacaagtgaaattcaagccaactttgaaaacctttttggtttatggattacaagctaagacttcaggtcttcagtgcaagtacatgatctaaatacaatatttattttcgtataatattatataatatgagaaaaccttcaaatgtatttatattgaaaatcttgtttactctgagtagctgaagaatccaagtgagactaattgtttcaaggtgagtgagtattttctcctgtcagagttgaccttcacctttctgattctgagacacaaacatcttcccaggcactccccagagctgtttatcatcccacttgggaattgaaacttggactgttttagtcagaaaagccccctttagctggtttgttgacagtcttcctaaactcatcaaatgtgtcagattttgcttcaagaagtccgtatttctcagaaaataagcttgacagctgggtcagcaattatgaggccagtaggaactaaacctcattggcattctgtggctgctcagagaagcaaggagatggggcaggatttgctttgacctgcaaggtcagacgggggagatttaccatctacccttactgggggattttcaggaccatgatttgcctaacaatcatagtctagaaaaatcttccaatgagtcatcactgaaaaaaacacacattgcattgaacagaatttacaataatgagagagttaaagccaattttgagatggagaaatattactcaccccagtatgtatttaccagttgtgttccaggtcactggcattgtgggtgaagtaataaactctcagtagtggtgtaccagccagtctcatgcacataacataaaaagaacaaatcgatccaaatggtccttggaatacctcaaatatcaaatactccttaatataccaactgtgggtccatgctgtgagaaatgttgatactcacttcataaaagcaccagagatttagaataatgaaaacagagcaatatatcttattactttgcaatacatattatcatctcaaaatggcaggcacactgacttaaagcagagagcaacttttagaaaagaacacaagaccttccttcattttctctctcccttcctgtctcattggctggataatcaggaatctacagtcttatacattatgacttcatctccatgatttacaacccattcattttagagattgactgactgtaggatgcttgttaaccttgactgttagtaactatctacaatagccagaatcatcatgctagtatagtttgagtatgggttgctagcttatggtctcctgatgtagaagtttctgattgtgtcatgggatgcaaacacagtactatgcagaggtagactcacgttgtgtgttggtgaggcaagtcctgtggaggctcatgtgatgtttggaaaaagtataagtatgactcaacacacagcaacagggtgcttgcatagctagctgagcaattcttccttggtctcatgtcttcactgacctacattttaagggaggcaagtcagaaaacttctgacatcccagctggtgctgattgctcctgctaactggtgcagagtcaggggggcttggcagtattcacgggatcacgccacagttactgattcatgttcggtgacacttttgaaaccgagtattggtatcatgacactactgaacaggagtcctggtatcctgacaaatggagattgaagtcaccccaaagaactatttctaaacatattaccttgtcttatttaccatcttttgacctctatattgggacagtaggctactgggtttaaagcatataaaaaccctcattaaggtagcttttaaagaaatctaaaccaacagtctcccagagtttctgtccatctgtatctgtacttaagatgatttaaagtatttttatattgaaaatgaaccaacagactttatttcttctgtatgccctgaattacatcaatgaggtcctagattctgtacttctggtctgcttccttgaatataatactgttgttctatgaagatgggggctccagtcagctgatctttgcatccacaagatcaaaccctgtgtgtactcttttcctgacatttcactaccggcaatacctttgactttcagaaatacttcccttgattggatatactcttgaaactctacttcactttggatgaggtgggtgcctgcttctactgggctgagagttgtgtctgtgctccctagcttgaagtttagaaccagaaagctatacctagggtgtcattactcatccatgctgtgcagccaggatttaggcacatattatgtaagtgattaataggagtaagccagggatttaggaagttttctttgtgggtaaaacagttgctgcactggtatgcatatctcaattcaggtcaaatgcacccaaataaataccaagcagatgtagaattctgcttcaaaacttagaaagtagaaacaggaatcctttcaacaagatgtcaagctagactagctttagtgaactgaggattcaagtcagtgactctgactcaaaaattaagatggaagcaagagggaaaagattttacatcaacctctggcctccatctctacatatttatacatacaatgtgacctccccatatttatacaacacacacatcatacatatcaatcagtcaatataaatataaacaaaagaatcaaggataaaccaagaatattggagaacaatctagttcatattaatcagctaaaaataatagacctagtaggaaccaagtaggcactggcagtatagaactgagggaaagtgaagagactaacatacatatcacaagaacagcatcatacttccactagcaaatgttataacagatgatgcattatacaaattcaggataaaacagtcttttataaataacacacaaaagggtcaaaaccctcttgattcttgccatcaagcttctggttttcccagctttttgtgatctcctactttacaaagtgctcccttgataaacttctttatgtatctacttctagctcaccacctattcccagtctcaatcatagctccaggacatgagaacatgaaaaattaccagggatagcctccatattcaatccatgcctattgcaaaagtaccacaaagtatttaccctaagagctttccaaacacaaatctttttgttcaggctctcacttgataagccactgccctgaatgaccatgtaatttttgtgtatgaagaaatacgtaacactaggtgccaggggattccacattaacttgtaaaaaaatataagtaatctttaaaaaatatgtgtgagtggggggtagagggacagagatagagatagagacagacagacagagagagagagacagaggtgtgtgtgtttggggaagtgtacatacttggtgtacatgcagaggtgagcagagaatcttgttcagtctctctcatgtacttttctgtgggtttcagatatttaacttcactgttaggcttgcagagcaaagcatcttatttgctgcaccaccttgcctgctctccatttttctttgttttagcctcttttctgtcttttcttgtcatttttattgatagtaaattgtattaaagtgcaataaaagcaggctataatttctctactctcagatcccccaacgtcccctctcccctggatccattctcccactgccttccttgagaaaagagtaggtttccaagaaacaacaacccaatacaataaaacagaatacaataagacaaagcaaaatcctttacaccatggctggataatgcaactcaagaaaaggaaaaaaagtcccaagagcaggcaaatgagtcaaagactcaaatttttaggaatcccacaagaacaccaagcttacaaccaacacatataacctagttcagacatttgcaggccctatgcttactggctttgtctctgtaagttaacatgagccctgttagttgactagatgggccatcatttcctgttatcttccatccatttttactcccacaatctttctgcaatcattttccataagattctataagctctgagggcagggacctgatgatgacctccattttaaactctttctgtacaatgtatgactgtggatatctgcatctacttccattagctgccaaaggaagcctcactgaagatgcttggacaaggggaatctatgagtatagcaaaatatcattaggattcatttctttttttcttgaccagtcatgtttgggtttaccctaggtcactgggctacctaatctctgcttcttgactactcaggaagtgtaagacatgcattctcatggaattgccctcaacttgaatcagatattgcttgactactcccacaagttctgcaccacagttgactcagcacatcttgcaagcataaagattttaggtcaaaagttttgaggcttggttgatgtccacatttttcttttagtatcctatagaataccttcccacactgaagacactagaatatagggttgaaggcttcacatgggcaccagctcaatctctcaatgttcaatgagctttgtggatattttcctcagcaatgagtccttgttataagtttctatttaaagagcacaaccgtctgtcctagcattaacctgggtttagatttacccactggatttaaagatctccacaggaacctcttgctcaacaactcaataaaatatatctcagtcctgccattgggagccttgtttggtgacaagagaaggcccgttcatactctgcatcccctattactagatcacttactaggatcaccctcatagattcccagggtttccattgcactaggtttccacataactccctcaaagttctcgagttccaggtgactctctgcatattcttcttccatctcccccaacaggatctgtgctgtccccatttatacctgcacagcaggtcacgtgcacaatctagttctccttccatgggagagccatctgttggatcaagagccctcctttttaacttagcctctctgaatctgtgaattgtagcttgtttattatttacttaatagctaatatttacttattcttttgcccactttgactttcactgtgtatgtttttctcaaactgcaaacatttctttatatctcacaaaaaccttaaaatacccccattatttaattaggcaaaacttgccttcaatgtcaaacaactcattactctgtgaattccttcctgcaggtgcatcatcttctgagtctcaactttccttttttaaaggaaggatagtctagatcatgcatgactgcaaggctcattaaatgagctaaatatatgctaacaattacccaaggatattttgtttaacacacagcatactcatctccataagccattgcaaaattgtgagcaaatttggagggcatattgaattctgttggctattttggtttccctattaagtagtaatcatggaattgaggagatacctcagtgaggtaaagggttttctatataagttgagtgacttgagtttgaacccatataaaaagctgaatatgggggcacacatttgtagtgacaccaatccctcagaataattggaaacagaaatgaaactaacttcaagcttatgagccagctgagttggagtacacattacagaggtagaagcaaaggagaaaacaagaagaagaagaagaagaagaagaagaagaagaagaagaagaagagaagaagaggaagaggaagaggaagaggaagaggaagaggaagaggaagaggaagaggaagaggaagaagaagaagaagaagaagaagaagaagaagaagaagaagaagaagaagaagaagaagaagaagaagaagaagaagcctattttgaataaaaggtggaaggagagaactgcctcctcaaagttgttttctgatctgcaactgcaaacaacagtacatgcatacctgtagcatacctataagtatacacacacacacacacacacacacacacacacacacacacacgagcatgcacacatgaagagagtctataaaccataaaataataacttttaaaaataagagctcatttttaattttgatgcttcttattatatgatacattttcttttgttatcttattgttttaaagagactaggtgaaaaaatttacatagtaaataaaggttctattgttcacaacaaattaaaattcaaacaaggcaacataacagaggtgttaaaatatccaatgctgaaaattttatgtgtgttgtatttctttttgtttaatggcaacagtagaaatgatgagctattcttaccattttaagtctgcttatctaagtcatgttgaagatagtaagcatctccctggtgcatggagaaaggagtaagtattcagtggatgaacttaatctttcttcaaaacttctcttagacttctggttttctaactgtgaaatggttatagtgattcatgtgcaacttaattaatattgcaaatattggcatttgactgacttctcttgaatgtgcaaaatgtttctgttgataattattgacagcgttaggnnnnnnnnnnnnnnnnnnnnnnnnnnnnnnnnnnnnnnnnnnnnnnnnnnnnnnnnnnnnnnnnnnnnnnnnnnnnnnnnnnnnnnnnnnnnnnnnnnnnnnnnnnnnnnnnnnnnnnnnnnnnnnnnnnnnnnnnnnnnnnnnnnnnnnnnnnnnnnnnnnnnnnnnnnnnnnnnnnnnnnnnnnnnnnnnnnnnnnnnnnnnnnnnnnnnnnnnnnnnnnnnnnnnnnnnnnnnnnnnnnnnnnnnnnnnnnnnnnnnnnnnnnnnnnnnnnnnnnnnnnnnnnnnnnnnnnnnnnnnnnnnnnnnnnnnnnnnnnnnnnnnnnnnnnnnnnnnnnnnnnnnnnnnnnnnnnnnnnnnnnnnnnnnnnnnnnnnnnnnnnnnnnnnnnnnnnnnnnnnnnnnnnnnnnnnnnnnnnnnnnnnnnnnnnnnnnnnnnnnnnnnnnnnnnnnnnnnnnnnnnnnnnnnnnnnnnnnnnnnnnnnnnnnnnnnnnnnnnnnnnnnnnnnnnnnnnnnnnnnnnnnnnnnnnnnnnnnnnnnnnnnnnnnnnnnnnnnnnnnnnnnnnnnnnnnnnnnnnnnnnnnnnnnnnnnnnnnnnnnnnnnnnnnnnnnnnnnnnnnnnnnnnnnnnnnnnnnnnnnnnnnnnnnnnnnnnnnnnnnnnnnnnnnnnnnnnnnnnnnnnnnnnnnnnnnnnnnnnnnnnnnnnnnnnnnnnnnnnnnnnnnnnnnnnnnnnnnnnnnnnnnnnnnnnnnnnnnnnnnnnnnnnnnnnnnnnnnnnnnnnnnnnnnnnnnnnnnnnnnnnnnnnnnnnnnnnnnnnnnnnnnnnnnnnnnnnnnnnnnnnnnnnnnnnnnnnnnnnnnnnnnnnnnnnnnnnnnnnnnnnnnnnnnnnnnnnnnnnnnnnnnnnnnnnnnnnnnnnnnnnnnnnnnnnnnnnnnnnnnnnnnnnnnnnnnnnnnnnnnnnnnnnnnnnnnnnnnnnnnnnnnnnnnnnnnnnnnnnnnnnnnnnnnnnnnnnnnnnnnnnnnnnnnnnnnnnnnnnnnnnnnnnnnnnnnnnnnnnnnnnnnnnnnnnnnnnnnnnnnnnnnnnnnnnnnnnnnnnnnnnnnnnnnnnnnnnnnnnnnnnnnnnnnnnnnnnnnnnnnnnnnnnnnnnnnnnnnnnnnnnnnnnnnnnnnnnnnnnnnnnnnnnnnnnnnnnnnnnnnnnnnnnnnnnnnnnnnnnnnnnnnnnnnnnnnnnnnnnnnnnnnnnnnnnnnnnnnnnnnnnnnnnnnnnnnnnnnnnnnnnnnnnnnnnnnnnnnnnnnnnnnnnnnnnnnnnnnnnnnnnnnnnnnnnnnnnnnnnnnnnnnnnnnnnnnnnnnnnnnnnnnnnnnnnnnnnnnnnnnnnnnnnnnnnnnnnnnnnnnnnnnnnnnnnnnnnnnnnnnnnnnnnnnnnnnnnnnnnnnnnnnnnnnnnnnnnnnnnnnnnnnnnnnnnnnnnnnnnnnnnnnnnnnnnnnnnnnnnnnnnnnnnnnnnnnnnnnnnnnnnnnnnnnnnnnnnnnnnnnnnnnnnnnnnnnnnnnnnnnnnnnnnnnnnnnnnnnnnnnnnnnnnnnnnnnnnnnnnnnnnnnnnnnnnnnnnnnnnnnnnnnnnnnnnnnnnnnnnnnnnnnnnnnnnnnnnnnnnnnnnnnnnnnnnnnnnnnnnnnnnnnnnnnnnnnnnnnnnnnnnnnnnnnnnnnnnnnnnnnnnnnnnnnnnnnnnnnnnnnnnnnnnnnnnnnnnnnnnnnnnnnnnnnnnnnnnnnnnnnnnnnnnnnnnnnnnnnnnnnnnnnnnnnnnnnnnnnnnnnnnnnnnnnnnnnnnnnnnnnnnnnnnnnnnnnnnnnnnnnnnnnnnnnnnnnnnnnnnnnnnnnnnnnnnnnnnnnnnnnnnnnnnnnnnnnnnnnnnnnnnnnnnnnnnnnnnnnnnnnnnnnnnnnnnnnnnnnnnnnnnnnnnnnnnnnnnnnnnnnnnnnnnnnnnnnnnnnnnnnnnnnnnnnnnnnnnnnnnnnnnnnnnnnnnnnnnnnnnnnnnnnnnnnnnnnnnnnnnnnnnnnnnnnnnnnnnnnnnnnnnnnnnnnnnnnnnnnnnnnnnnnnnnnnnnnnnnnnnnnnnnnnnnnnnnnnnnnnnnnnnnnnnnnnnnnnnnnnnnnnnnnnnnnnnnnnnnnnnnnnnnnnnnnnnnnnnnnnnnnnnnnnnnnnnnnnnnnnnnnnnnnnnnnnnnnnnnnnnnnnnnnnnnnnnnnnnnnnnnnnnnnnnnnnnnnnnnnnnnnnnnnnnnnnnnnnnnnnnnnnnnnnnnnnnnnnnnnnnnnnnnnnnnnnnnnnnnnnnnnnnnnnnnnnnnnnnnnnnnnnnnnnnnnnnnnnnnnnnnnnnnnnnnnnnnnnnnnnnnnnnnnnnnnnnnnnnnnnnnnnnnnnnnnnnnnnnnnnnnnnnnnnnnnnnnnnnnnnnnnnnnnnnnnnnnnnnnnnnnnnnnnnnnnnnnnnnnnnnnnnnnnnnnnnnnnnnnnnnnnnnnnnnnnnnnnnnnnnnnnnnnnnnnnnnnnnnnnnnnnnnnnnnnnnnnnnnnnnnnnnnnnnnnnnnnnnnnnnnnnnnnnnnnnnnnnnnnnnnnnnnnnnnnnnnnnnnnnnnnnnnnnnnnnnnnnnnnnnnnnnnnnnnnnnnnnnnnnnnnnnnnnnnnnnnnnnnnnnnnnnnnnnnnnnnnnnnnnnnnnnnnnnnnnnnnnnnnnnnnnnnnnnnnnnnnnnnnnnnnnnnnnnnnnnnnnnnnnnnnnnnnnnnnnnnnnnnnnnnnnnnnnnnnnnnnnnnnnnnnnnnnnnnnnnnnnnnnnnnnnnnnnnnnnnnnnnnnnnnnnnnnnnnnnnnnnnnnnnnnnnnnnnnnnnnnnnnnnnnnnnnnnnnnnnnnnnnnnnnnnnnnnnnnnnnnnnnnnnnnnnnnnnnnnnnnnnnnnnnnnnnnnnnnnnnnnnnnnnnnnnnnnnnnnnnnnnnnnnnnnnnnnnnnnnnnnnnnnnnnnnnnnnnnnnnnnnnnnnnnnnnnnnnnnnnnnnnnnnnnnnnnnnnnnnnnnnnnnnnnnnnnnnnnnnnnnnnnnnnnnnnnnnnnnnnnnnnnnnnnnnnnnnnnnnnnnnnnnnnnnnnnnnnnnnnnnnnnnnnnnnnnnnnnnnnnnnnnnnnnnnnnnnnnnnnnnnnnnnnnnnnnnnnnnnnnnnnnnnnnnnnnnnnnnnnnnnnnnnnnnnnnnnnnnnnnnnnnnnnnnnnnnnnnnnnnnnnnnnnnnnnnnnnnnnnnnnnnnnnnnnnnnnnnnnnnnnnnnnnnnnnnnnnnnnnnnnnnnnnnnnnnnnnnnnnnnnnnnnnnnnnnnnnnnnnnnnnnnnnnnnnnnnnnnnnnnnnnnnnnnnnnnnnnnnnnnnnnnnnnnnnnnnnnnnnnnnnnnnnnnnnnnnnnnnnnnnnnnnnnnnnnnnnnnnnnnnnnnnnnnnnnnnnnnnnnnnnnnnnnnnnnnnnnnnnnnnnnnnnnnnnnnnnnnnnnnnnnnnnnnnnnnnnnnnnnnnnnnnnnnnnnnnnnnnnnnnnnnnnnnnnnnnnnnnnnnnnnnnnnnnnnnnnnnnnnnnnnnnnnnnnnnnnnnnnnnnnnnnnnnnnnnnnnnnnnnnnnnnnnnnnnnnnnnnnnnnnnnnnnnnnnnnnnnnnnnnnnnnnnnnnnnnnnnnnnnnnnnnnnnnnnnnnnnnnnnnnnnnnnnnnnnnnnnnnnnnnnnnnnnnnnnnnnnnnnnnnnnnnnnnnnnnnnnnnnnnnnnnnnnnnnnnnnnnnnnnnnnnnnnnnnnnnnnnnnnnnnnnnnnnnnnnnnnnnnnnnnnnnnnnnnnnnnnnnnnnnnnnnnnnnnnnnnnnnnnnnnnnnnnnnnnnnnnnnnnnnnnnnnnnnnnnnnnnnnnnnnnnnnnnnnnnnnnnnnnnnnnnnnnnnnnnnnnnnnnnnnnnnnnnnnnnnnnnnnnnnnnnnnnnnnnnnnnnnnnnnnnnnnnnnnnnnnnnnnnnnnnnnnnnnnnnnnnnnnnnnnnnnnnnnnnnnnnnnnnnnnnnnnnnnnnnnnnnnnnnnnnnnnnnnnnnnnnnnnnnnnnnnnnnnnnnnnnnnnnnnnnnnnnnnnnnnnnnnnnnnnnnnnnnnnnnnnnnnnnnnnnnnnnnnnnnnnnnnnnnnnnnnnnnnnnnnnnnnnnnnnnnnnnnnnnnnnnnnnnnnnnnnnnnnnnnnnnnnnnnnnnnnnnnnnnnnnnnnnnnnnnnnnnnnnnnnnnnnnnnnnnnnnnnnnnnnnnnnnnnnnnnnnnnnnnnnnnnnnnnnnnnnnnnnnnnnnnnnnnnnnnnnnnnnnnnnnnnnnnnnnnnnnnnnnnnnnnnnnnnnnnnnnnnnnnnnnnnnnnnnnnnnnnnnnnnnnnnnnnnnnnnnnnnnnnnnnnnnnnnnnnnnnnnnnnnnnnnnnnnnnnnnnnnnnnnnnnnnnnnnnnnnnnnnnnnnnnnnnnnnnnnnnnnnnnnnnnnnnnnnnnnnnnnnnnnnnnnnnnnnnnnnnnnnnnnnnnnnnnnnnnnnnnnnnnnnnnnnnnnnnnnnnnnnnnnnnnnnnnnnnnnnnnnnnnnnnnnnnnnnnnnnnnnnnnnnnnnnnnnnnnnnnnnnnnnnnnnnnnnnnnnnnnnnnnnnnnnnnnnnnnnnnnnnnnnnnnnnnnnnnnnnnnnnnnnnnnnnnnnnnnnnnnnnnnnnnnnnnnnnnnnnnnnnnnnnnnnnnnnnnnnnnnnnnnnnnnnnnnnnnnnnnnnnnnnnnnnnnnnnnnnnnnnnnnnnnnnnnnnnnnnnnnnnnnnnnnnnnnnnnnnnnnnnnnnnnnnnnnnnnnnnnnnnnnnnnnnnnnnnnnnnnnnnnnnnnnnnnnnnnnnnnnnnnnnnnnnnnnnnnnnnnnnnnnnnnnnnnnnnnnnnnnnnnnnnnnnnnnnnnnnnnnnnnnnnnnnnnnnnnnnnnnnnnnnnnnnnnnnnnnnnnnnnnnnnnnnnnnnnnnnnnnnnnnnnnnnnnnnnnnnnnnnnnnnnnnnnnnnnnnnnnnnnnnnnnnnnnnnnnnnnnnnnnnnnnnnnnnnnnnnnnnnnnnnnnnnnnnnnnnnnnnnnnnnnnnnnnnnnnnnnnnnnnnnnnnnnnnnnnnnnnnnnnnnnnnnnnnnnnnnnnnnnnnnnnnnnnnnnnnnnnnnnnnnnnnnnnnnnnnnnnnnnnnnnnnnnnnnnnnnnnnnnnnnnnnnnnnnnnnnnnnnnnnnnnnnnnnnnnnnnnnnnnnnnnnnnnnnnnnnnnnnnnnnnnnnnnnnnnnnnnnnnnnnnnnnnnnnnnnnnnnnnnnnnnnnnnnnnnnnnnnnnnnnnnnnnnnnnnnnnnnnnnnnnnnnnnnnnnnnnnnnnnnnnnnnnnnnnnnnnnnnnnnnnnnnnnnnnnnnnnnnnnnnnnnnnnnnnnnnnnnnnnnnnnnnnnnnnnnnnnnnnnnnnnnnnnnnnnnnnnnnnnnnnnnnnnnnnnnnnnnnnnnnnnnnnnnnnnnnnnnnnnnnnnnnnnnnnnnnnnnnnnnnnnnnnnnnnnnnnnnnnnnnnnnnnnnnnnnnnnnnnnnnnnnnnnnnnnnnnnnnnnnnnnnnnnnnnnnnnnnnnnnnnnnnnnnnnnnnnnnnnnnnnnnnnnnnnnnnnnnnnnnnnnnnnnnnnnnnnnnnnnnnnnnnnnnnnnnnnnnnnnnnnnnnnnnnnnnnnnnnnnnnnnnnnnnnnnnnnnnnnnnnnnnnnnnnnnnnnnnnnnnnnnnnnnnnnnnnnnnnnnnnnnnnnnnnnnnnnnnnnnnnnnnnnnnnnnnnnnnnnnnnnnnnnnnnnnnnnnnnnnnnnnnnnnnnnnnnnnnnnnnatgggaaggtggtttttgagaaaatcaacaagatagataagcctttagcaagtctaaccagaaaccacatagacagtatccaaattaacaaaatcagaaatgaaaagggagctataacaacagaaattgaggaaattcagaatatcatcagatcctaccacaaaagcctatactcaacacaactagaaaatctgtatgaaatggacaattttctagacagataccaaataccaaagttaaatcaggatcagataaaccatctaaatagtctcatatcccctaaagaaatagaaatagtcattaaaagtcttccaactgcttggaagtggtggcacacgcctttaatctcagcacttggaaagtagaggcaggcagatttctaagttcaaggtcagcctggtctatagtgtgaggtccaggacagccagggctatacacagaaaccctgcatcaaaaaccaaaaaacccaaaaacccaaaaacccaaaaacccaaaaacccaaaaacccaaaaaaaccaaaaacccaaaaaaccaaaaaaccaaaaaaccaaaaaaccaaaaaaccaaaaaaccaaaaaaccaaaaaaaaccccaaaaaacaaaacaaaaaaaaacccaaaaaccaaaaaactgaaaaaccaaaaaacgaaaaaaaccaaaaaaccaaaaaaccaaaaaaccaaaaaaccaaaaaaccaaaaccaaaataccaaaaaaccaaaaaaaaaaaaaaaaaccaaaaaaaaccaaacaaacaaacaaacaaacaaacaaaagaaacccaacaaataaagtctcccaaccaaaaaaatcccaggaccagatgggttttgtggagaattctaccagaccttccaagaagacctaataatgatactcttcaaacaattgaacaaaatagaaacagaaggaacactacccaattcattcaatgaagccacaattatgctgataacaaaaccacacaaagacccaacaacaaaagagaacttcagaccattttcccttatgaatattgatgcaaaaatactcaataaaattctcgcaaaccgaatccaaaaacacatcaaaacgatcatccatcatgatcaagtaggcttcaaacattaacaatagcatcaatttgacacacagacagttctatttgtaaatacttggtgtgtgtgtgtgtgtgtctgtgtgtgtgtctctgtgtgtgtctgtgtctgtgtcttctgtgtctgtgtctgtgtctctgtttgtgtctctgtctatgtgaaatcaaagttcaggacagtgagtggcaacatataagaagaagctagataatgtagaagaggctcaatggttaagtgcacatattccttatacagaggaattgggtgtagttccaagcttacatatggtgtcactcacaactgtcattgtctccttctccatgagacctgactcctgcctcttgcttcttgggatactagcactcacatgtacatatcacactttcacaaatacacataactattaaaaaatttaaataaaaatgataaattaaatctaactgatgaagaatagataaaccttttgtaaggaacttaaattatgttgaataatgaacatataattactatttgcaggacagctgacaatattaaatatttgtttcaagggccaggccaattacaactactaaaaatatattgagtagaactcacttaggcttcatctggactaaatcagaaatctgggaaagggatctgatctatgcccagaaatccttcaggcgacttctgataccactccctcacacactggctgaaggcctcgaccttggatctctctctatatatatatttctctctctccatttctctctctctatttctctctatatatttctatttctctatctctatttctctctatatttctctatctctatttctctctatatttctctatatatatttctctctatatttctctctctctctctctgtctctctctctctctctctctctctctctctctctttctctctctctctttttctagattgcatgcttgtccttggggtgtaactgtcaacttttttagatgtgaagtagacagtacctataatcaactggaacacgtttccaggcacacctgtaagggatattctaggttagattagtttgttcataagggtgtttttcagtctggatttctattgctatgataaaactccatcaccaaaagtagcttgtagatgaaaaaaggtttatttcagcttaaatttccaattatctgtccattattcaggaaagtgaggactgaaaatcaaggcaagagccaggttgcagagagcatgaagagaccatggaagagtgctgttcattggcttgctcatcatgccttactcaaacatctttgttatatatatcaggtccaatgttgacataccatgactggcaccacccactgtgaagtggaattgcccatatcaatcaaagagacaaatgcaccacaggctacttaacgaatcaatcttgtagtgaaactttttcaaaaggtatccctctgctcaaatgacactagcttatgtcaagttgacataaaaccaaccagaacagattgattgtaggattaattgagctagaaacccatcctcatcaatgacaccattccctgggatgagatgttggactgtattaaaaggagaaagtgaattggaaataatggaacaattagaaacaaccctttttcttctttcagtcattatcatgagccttaagaaagttattttcctttgatgccaacttcagttcagtgtattgtaaataatatatgtcattcgtaacttcaaaaggcacattgacatcttttgactcaaagggaagaataccaggtagatatttttgaattgctgacaatggaagatctttcagtaccccttgtgattctatgtcaacttgtttaattgattgaagaaacaaagacttcacaggaaattagacttacctcaaagcacagagatatttttaatgaacatggagacattattgacaaaaagaaagtcatcaagtccttattcactgtcatcatttttgtgaaattctttagtgtccaaggtaattgttctaaaatctatgctattacctaatttaccatcaaattgcaagcctgtttgcctttgtaagatctcattagcatagatattctatgagctcacagctgtgtgacactgaaatgactgttagatcttaaggaagtgaaactctgtggtgacacagtttatgcaactggagctgcttccttcatgtatgtcttgtcatgtggataatactccgtaagggtgaaacatcttgaaatacctctctcaagcaatttctgtgtcaggagcctcgaacttttgccagaatgtgcagacaggactctctagacatcataaaagaagatagattgaggatggtgtcaaagaccacctgcactcgattacaagagttatatgtcagaagtctctatccttggagatttacctcaaaggaaggaagttgagggaagtaaaagccatttgggtagagagcattccattcaactgtttcccacatgctggtataaacctaaaagataagaactcaaaatttcagtaaatcagaagcaaaaccattgcaattgttagaaggagctgaacactggtatacaaattgagaatggtttctatcataggccattctgttaagttaacaaacaaacacacaaagaaccataaaaacactatagcttctggcctgagttctgtgtgaacaagagttgtggactactatagttggaatgatgccgtgatcacttcctgagatcctctgtcagagcattccaggatattttttctacctcctctattatagtttatgtcaggacaagttgtattatgcaactctatctttatttacaaacattaccaaaatgtaggactactggccagaaaatgtggtagttactgatccttcttttacaccacgtggtgctttgattgggaaggctgccataggctcatcttctagtacttggtcaccagttaacagagctctttgggaaaagttggaagatgtggccttgctgatgaaggtgtatcactggggacagggctttgagattgcaaaaagcccaaactgtttcaaactaattaattctctctgcttggtgcttagggatcaaaatatatgctctcagctactgcagcattttaatccctgcctgcctgcgattttgctccaccccacaatggtcatggactcaaaaccatgaaaccatgagtcccaataaactcttttgcttttcttttcttttttttttctaaattggatattttatttatttacatttcaaatgttattccctttcccgatccccctctcccagaatccccttataccatctcccctcctcctgcttctatgagggtatgaccccacccactcactcccacctacctgccattgcatttccctgcagtggggcattgagatttcacaggacagagaacctcttcttccattgatgctaaccatcctctgctacatatatgactggagccatgggtccttccttgtgtactccttgattggtggtttagaccttgggtgctcttttttctttaatttgccttggtcatggtatcttatttcagcagtacaaaggtaactatgaaaacatcatagatgttcatcaaaagacttgatgaaattttgtgaatcatctagaatgacagctctagcttcagaagatctgatgctgtcttctgagtgactgcatttatgtacaagtacaacacacacacacacacacacacacacacacactcacacacacattttatacatatattttttctttataaacactaaacttgcatgcctgagtggaagtagggcacatacctgcagtcctaaatcttgagaggtacagatattacttctggctatgtagatttagtaatcatcctgggctacctgaaatcatttctaaagagtgaacaaataatatgggattcaatggggagaggatataagacaataatggtaaagacatattatacatattatatattatatatatatatatataataaactgttaaggaatgaattaactataagaaatattcatgatattcatataattgcatgagtacctttatagacatttctaagaaaatgaaatgactgttttatcattaaacagcatggaggcctttctaaataaggcatagatgggggaggagaagtaataaaatgtaggaaaattttcatttctataaaacctttctaagtctttctattaaaaagagcatatttgatgccatcatatttcaccaagtaactaaaaacagtgcttcaaagtataaaactaacaaatatagttttttttccattttttattaggtatttagctcatttacatttccaatgctataccaaaagtcccccatagccacccacctccactcccctacccacccactccccttttttggccctggcgttcccctgtactggggcatataaagtttgcgtgtccaatgggcctctctttccagtgatggccgcctaggccatcttttgatacatatgcagctagagtcaagagctccggcgtactggttagttcataatgttgttccacagtatgggaaaacaacaaaagaactcactgatttaaaaatatagattatttaagcttatgcaaaattatgatccttatgacttccaaaacagaaaattctaacaatgttccagtgaggggttaactgagactttcaagaccaccatcttatagctttccacatttgcatgtacattgttataatgaagtataataaatacaatatttatgaaatgacaacataattcaatattaaacatagtttcccacacacagactgagttccttaaaatttggtcagagttatacgctaagaatttgaaaaaaaatatgaaggaaaaaggaagacaattggttattctcatagtagtcatgaaactgtttcattctggttacctcctttctgtttagtcattattatagctcacatgattcatggctgagtaaaccactgatacctctgctactatgatggctacctggtagggaataaacttcttgtttagatccagcctaatttttataatccaataacaaaaacgtgtgtgctgtcagcaataaaccttaccatcaagttccagttgacaaccaagaacaatagtgataacctatttcattttaaggaattctgatggaaatttttttaatagcccaaaagggttggtaatttaaaattatgattagccccacagtagagtagcttgccagagtgtcacaaagactttgcatgtgtccacacagacaaatgctcatactagggtggaatgttcttgggtcatctgatatatatatatatatgagattttaatttttaaaaagtcaaacaaactaaaaggaaaatcaaaccatgctggaaggacattgaagtgcttgttttagtagaatttgagagtgcaatgaaagaaaagggacattatccattttaatatctatctttaagtaacttttaaatttttgtgtaacactttaaaatgaagtaggccacataaaggatgaatgcttcatgacatagttcttacatgtacttctaaaattacttgttctcatatctttttattcaaaaattttcttttaaaatcaattttttgggggcatgttggtatacacaattaatacttgcactgagaggtaaagacaggcaaatctctatgagcatgacattatcctggtttatatagtgagttccagaacaaccagagctatattgagagatcctatctcaatatataaaatatcaatacatatcctggtatatattgatacatatttttctgtcatatttaatattgtttagttttaatacttactaagatgtgtctgctgtgtgtacatattcatgtgtgaatatgagggcacatttatattacaggtaaaactccacaatggatgttttttctttctttcctcccaaattattttaatgcatttatttattgtttatacagttactgtgatacacattatatgtatactactttgtactatatgattaaatttacctatattcaaaactacctcatcattccatacatgacatgtaatttaagtatataagggctgagatttttctgcttctttatcatttgtttctataaactacaactctctgatagtactagggacatttcttaactatgaaaatgaattttgtttgtgtgaattagcatagtatcaatctaaactcaatcctacttttctgcttgtaagattttttttttcctgcttgctgtggaattgctcaaattcccagtcatctgccactcctactccccttctaggctgatagctgccaaacctactctgcaatcccaaatttcccaggctagctgggtggtattctctgcaaacccatgctcagctgaagttccctttccctggaattcagtagaatcgctgcgagaaggaaaacaccaatcttagtttagaatcaccaggtaccacaatttctggtcatggaatctagtatcctaaatttaccaactattctatgttagaaatattccggtggatgatggaacctggtggattctgccactcaaactaacagcctggcctatatcctaaccgctttgctcccactgtccaataggaagtcccctttcctgctttccctctttcactctgacagagaaggcctgtctctatctcgtccagtgattggcttattttctttattatttaatcaattaggaggaaatttagctacagctggtgcccttgctattgcttgacattacctactgacaacttccctcatcacacacacatgatttaaaggatggttggacttgtaggactgtttatctgtgattgaataaatacagattccaggaaaattgtttctaagacaatgtaaagtataaatgctattaatgtttctccccaacccacctccacgttcggcactaaactaaactataataagttgcaaggctagtctaaattaattcatagagaatacagaccatctcatgaaaataaaataagaaaatagaaaatgagaagatgtgagataaatagaaaggagggaaggaaggaacaaaggaaggaaggaaggaaggaaggaaaggaaggatggaggagagggagagagagagagagagagagagagagagagagagaggaaacatttgacctcttgtattagtttctcttctattattgtgttgaaatactctgacttaagttatcttagggataaaaggtgcaatttggcttaaagttttagagggatactagtcatcattttagacaaggaatagcagcaggagcaggaggctatctgctataccacagcagcagtatagactttgggagaaaatgaaataggtacagcctataaaacctcacggtgaagtactcagtctagcaatgctccatcccctaaatgttccaagactttcataacagtgcaaacacttagaaacacttgtgtctctgaaaatgtttgacattcaaatcataacacttgtttcacctttaaaccagtcctacaagagatatagttcatgttataaattataggaatccctaagacacagggagatggaagcatcttcagtcctcttgcccttttagtcacatagtcatggacatatgatgtccagagattcattggggaacatcgctgctctcttggagataggagataaaagatggaaagtggagccgggtgtgaacactttctgggaaagactagattttactaagtcattcccttttgttcaaattttccaatttgaaactgtgattttggtcttgcttattttatatttccttaaatgtcataattctgaaatgtaacaaaatgttacctatatgtatgcatataatcccaggactgttgggcttgctggaaaccattctagcataataggtgagctccaggatcagagattctattattaaaaaaaaataaataaacaaaaaaacaaacaaacaaacaaaagaactgaatgggtggtttatcatcaggctccataggaagatgcacttgcagccaagtttcatggcctgaatttagtccttgagtcctataaggtgcaaggcaagaaccaactttctcagttgttttctgacttccacatgtgctccttggcaggactatttctcccccacaggaactacctctctaaatactaaataaatgagttaataataaataaatgatctaggaggagaatacaaaaaaaaaaaacaccaacagaatggagctctggctgctatataaatgtgcatttacatgtatgaggactcacacacacatgagtatgcccatgtgaaagacatatattaatatgtattaaaagtaagcaaatgacattaaacacgagtgaacatcttttaatgctggcatcatacctgagaaagcccaccatttctccccttattgctccttcagtgctggaggattgaacaagggcctcatgcatgttaggtgagtgcccaaccactcagcatctgccctggataagttggcttggagcactgctctctgtggcatggttgcttgtgatctttctgctgtctttttttttcagatattttcttcatttccatttcaaatgttatcccctttcctagtttcctctccaaaaatacgctaaccctccccactccacctgctccccaacccacccccttctgcttcctggccctggcattcccctatcctggggcatagaactttcacaggaccaagggcttctcctctaattgatggacaactaacccatcctctgctacatatgcagctggagccatgagtcccaccatgtgttttctttgattggtggtttagtcccagctctggggttactggttagttcagattgttaaagcagctaaagtaacaacattgggcagacccaccaagcctggattccttgtttgtatcaacattgctagaagtgacagataacataatttcttgttttatgcaagtttttgctagaatgttgatagtatggcttaattggccttccatttgtagtggagatggataatcagacattttggagacaggttgaggtactacagtcatcagtaaaataatagaaaatttgtcagacatacacagagcctggggcaagaatacaaaggaagagtcacacatgtcctaatctaaatatttaaagagttacaaaataagctaaggatttagtcaaaaatatgttttcaacttttccaatatgatcaaattgccttcaaagtcacagtgctccatgcacctctctgtccttactgttaacaactcccttctagactcagaaaacagacaccgttgattttgatggttaagacaacacatgtttgagtgaagagactcacctgtcttgggaaggtccaagtggaaaacagcagtaacatacttgtggtcttctcacctggcctatgagcatcattcctaagaaacaggatgtggtctgttgtctcacagatatattccatgtccatagcaggatcccctgctttctcagcatatggaggacactgaagtaaagacttccatacagatcttttctacagtaataaaatgtatacaatttgaccaattggccaaagaacctaatatttgatatatggaaacaacacctataccgtttatgttagaccaatgttcgacctggtttgccatcggtggtcagagtctgtgaaagacacccatttactcatttagtaggtggagccataggcattcctcatgctctggtctgcatccatcctcaagtgcaagacctgatcacacatggaaaacagtccagtggcctatgggaaaggtggaatggtcaatttgtactagtaagagctcacaggcaacatctgttaatctctgctttaccttcctttttctcctctgcaagggctgtagcaagctcttaaagagcattgatctaactattgtctgtatctatcacaatgtggcaaactgccaggtcaggctgatggcctgatagctcactgaggctttgaaccttttagttttcttaaagatcagactaaattgagatgactaagtaagttgcttgtctttcaagcatgacaatttaacttcaaaagtgttagatgttgtcttgcatatttataatcttagtgttgtagcaacagagatacatggatcactggggctcactggttaaccaatcttgctgaattgaaaaggtccagaataaaagaaacaccatgtctgtattaggtactttctattgctgtaccatgcccagggcaatttacagaagaaagagtttatttgaggctcagagtttagggtttcatgatcacagagtagaggttgcaggtatttcagatcaaatcaatgcataaaatacagatctcatcagaaaactgagattactgtcttcatttctaatgatagaaactcatcaaccatgactgaattctggccatctaggttgggctgaccttattgaagtctcaagtgacccagaggagagatggctcagttagaaaaatacttgcccggcggtggtggcacatgcctttaatcccagcatttaggaggcagaggcaggcagatttctgagttcaaggccagcctgttctacagagtgagatccaggacagccagggctgcacagagaaaccctgcctcgaaaaaacgaaaaaataaaataaaataaaataaaataaaataaaaataaaaataaacacttgccttgaaaaatgatgatctgaatcccatcctcagaacattgttagagttggattctgttgctgttgttactaccaaataccattggagaggaaagggtttatttcctctcattcttccaggcagctgccaatcactgatagagtcaatgtgagcaactcaaacagaatctatggatgatactgcttactggcttgtttctcatggcttgactgtcttcttcattagcataggaccagttccttacaggcggtacccttcatagtgggttggcacttagcaaaacattcaatacttaagaaaattctccaaggacttaatataggccaatctgatggaggtattttctcagttaagtatccctcttacttagatgactcagtttttgtcaagttgacaaaattaaacatcaaacaaatagatacataaactatttttttaacattgatgttcaaagaaagcctggtaaagcaggcaagcttttaaaccttagtgttaagcagacaaatagagatggatttctggtgctattttgccagtcagtctcaagtcccaaagagagacattgtcttgaaatacaacatgcagagccttaagaacagtcctccaggtttatctctgactcacatatatgcatgtgcatacatacacatttagattcaaaccagtgttttattctttatgcatgtctgtgggtgtccacttgttattgcttgcctgttgtttgagatttttccatcacaaaaatgactaccagagcaaaggcaaaggcaaaaaaaaaaaaaaaagtcacatattttgggaaactgtaaaattagaaagttcagaacctgcatttaaactgagctagagaaaaatttagtaaaggagagagaaactcattgtcatggaagtactatcaaggatcagaataaagagaacagctatgagacaaaaccagggtaataaggtcaaaagaaaaaagaatcacgatttagagtttcatgtatttaacatcaaagagggctttgaattttttctggctgcagcctgcctgtgtcactagattcctggagagaggatattggcagaggccaagctgtgagtagaatatgcagtctccctggtctcttctgagcctaaaatcaaagaaaggcacactgtgtaatttgtcaggacaagcaagtgacaaggagacaaaattgtcaaaaagcagaaggccaaagcagagtgagaaggaaattgcttatcatattttttgatccaagtcaacaggcattattttgatctatgactgaatcacatgctcaaaattgaggtgctgcagagatatctgatttgataaactttatgctacacaaagataaaggcttgaatttcattccccaacccttttgaaaaagtcacctggacataatggcttgtgttccaacactggtgagatggaaatgtaaaagtgttgagggctctttggctacccagtctctccaaatttgaaagcactgagctcagtggtcctgtatcaaaaaggaaggtggaacttaattgggaaagtgagtgtccatatgtaagtgcatagatatgaacacatacacaaatgaaagacttaagcctttgcagcaaatttaattgaaaatattttaatgatgaactcacttaaatgcatagaaaatagcataagataattaatatgtttgaaagtaaaatttaaagtaaaaatataaaggtcatggtgagtctgtctgctttctaatttacttcatacttactatatgagggtatcacataaaatataaacaagtataacacttagttatccactgacactcaaaatccactggctcactctgacatgctgtaagctgccctgtagcagatttctggtgaaaggcattaaaggaaggctgagaggatttgtctaagcaatacagttttatacctaggcgaatgacccaagagatagagtcaccttacaggaatagagatagtttattatggtcccaaatatgagtgaccctgaccaaagaacacattcatattgcctctaagagtatgtgccaccatggtaatacagaacaaataaatccatacatcaaagaaattttaaagcacagtcaggtacaggaaagtaagaagttcctgctatgggtctttaatattttctgatgacatttgtaaaactctttggttggtggaagcctggcagactatttgaatactccagtagagattttaccttatggaaaggatgttaagtcagacacagaagtggagagtagatagctatgaaggggaactaactatagcccaggtctgtaagattctcagaacaggagatgttaagaggcagccttgcagaatggttgttacagctatgacattttcctgagaatgtcagtttgcagagtcaaggagaaaacccaaactggaaacttgagtgtgtgtaacttttccctgaacaagtcaggaaacaccaaacagtttgcaagcaatcattatcaatctttacaaataagagcttccataatttaaccattgtagatcatacacaagagtgacttggacagagagataattccatgcaaaattttaacttttactacaaaaaaaatttataaatcacataaaaatcaaatacaaacctgagactgaaattactaacggaaaattcattgttttctatgaggtagcatatatggttttgggaaataacatctatgaagcgaagctatcagtacacaaagcagagttttccagtctgactacatggtagtgaattaagtttccaattcatagtacaattatattgtcaaattctctactggaaaatctagagtggaggaggttatttctgtactgggacccctttccactcccaggagaaatttttttttcggttttgcatttttttctaaataaatttaaatattctttgctaatagaaaaaaaacctaaacatataatgcagttgtgaaatggatattcatggttaaggagagcacctcagtacaatttgatttcatgttggacttgagctgttccccgttgaatataggcatatgctaggaatttcaatgataagtcagtatttattgttgagtgataaatgtgactgtggtgactctcttacattcacgctgctgctgtagtaaaatgctatcaaatcagttcaggtcagcaagtgtttacttggcttatcctttcaggtcatcattcatcattgagggaaatccgtgaaggacctcaatctggaacgtgaacaaaaaactggctttctctggcctacatttaactaattttcttagccagtgcagacacatctgtttaggcacggtgctgccaacagaggaccttctcacactaataagcaatctttcataaacccagccatagaacatcagttactacttccatgaagtagttctgtgtcaagttgatatctaaagctaagacactgcctaatagttagttggttcttcttaaagctatctacataaagagttccttatttctttactgtgtactgctaaccaaggtgatgcctatcaggggtcttgcatcctcaccgcagacatgtaatttacgttttctacctggaaatgtaaccctgtacccttagccatttggggtccatgaaagtcttttgctactttctgttgctttcatatgtgatgtttgtcatggtgtggtgcagtctatgagatgaatctcaagggctcccccaatccagttatttgccatttacattttctgagagatactgtacattaaacttctcttgctattcttgtgcctttgccatactaagagtatgactaagagtgactaagttgtaaccatgcagctctcaggcctcccatattgtgttccacccacccagatgttttagtctggggtcattctgaaacccaagcaaccttaaaggtcttgaagcataatacgatataagaacaccataaatgctttcttacctgctttatacattggtggggttaaaatacacagagtaacttcaagaagaaagagttttattttcagttccagtgaagggcacagttcataatgtccaggaatacatggcagcaaaaattctgacagctattcatattgcatccacaatcaagaagcagagagtgttaagtgctaggttcaacttgttttcttcatttttattcagttcatgactttgctcactgaaaattactaccctaattaaagcagtctagaaacaatctcagggaaatgcccagatatttgttctttagttactctacattcagtagcccatcaatattaactgtcccaagtgtgtttttgccccttaggtgccccagagagcagcagagtagaagtcctgttacttctcccttgtataatcccatccccaccccaaatctcttttcaaatcttccacacaacattatagatggttccccttccatgcaacatgagattgcaattttgttatttcagtatttcacatatttttcttctacaatgcttctgttctaaaacttttggtcaaaaatcttgctgggcgtggtggcacacgcctttaatcccagcacttgggaggcagaagcaggcagatttctgagttcaaggccagcctggtctacaaagtgagtcccaggccagccagagctatacagagaaaccctgtctccaaaaaaaaacaaaacaaaaaacaatacacaaaaaaacgaacaaaaaacaaaaatcttgttgctgaaaagtcaatgctttattattttgcttcagagttttcaagaactattctctatagtctataatttttatcagtaaagcagacgactaaggagtttgctttagaaattaaaggagcctaatataatatttaagagaacaaatttaatagggttatttgattttctggagtgatcttcttgagttctttatatatattggatatatcccttatctgatttaggattggtaaagatcatttcccaatctgttggtgccctttttgtcttattgacagtgtcttttgccttacagaagctttgcaattttatgaagacccatttgtcaattctcaatcttacagcacaagccattgctgttctgttcaggaatatttcccatgtgcccatctctttgaggctttccccctctttctccactataagttacagtgtctctagttttatgtggagttcagggtacagagctaaacaaaaaattctcaactgaggaatactgaatggattagaagcacctgaaaaagtgttcaacatccttaatcatcaggtaaatgcatatcaaaacaatcctgagattccacctcataccagtcaggatgactaagatcaaaaattcaggtgacagcagatgctggtgaggatgtggagaaatagggacactcctccattgctggtgggattgcaagcttgtacaaccactctggaaatcagtctggcggttcctcagaaaatttgatatagtactaccaaaagatccagcaattcctctcctgggcatatacccagaaaaagttccaactggtaataagaacacatgctctactatgttaatagcagccttatttataatagccagaagctgaaaagaacccagatgtccctcaacagaggaatggatgcagaaaatgtgatacatttacacaatggagtactactcagcaattaaaaacagtgaattcatgaaattcttaggcaaatggttgcatctggaggatgtcatccagagtgaggtaacccaattagaaaagaacacacatggtatgtactcactgataagcagttattagcccagaaacttagaatacccaagacacaatttgcaaaacacatgaaactcaagaagaaggaagaccaaagtgtggatactttgatccttcttaggatgggaaacaaaataaccctggaaggagttacagagacaaagtatagagctaagagtgaaggaaagatcatcctgagactgccctgcctgggttccatccttatacaactaccaaacccagacactactgtatatgccagaaagactttgctgacagaaccctgatatagctctctcttgtaaggctatgccaatgtctgaaaaatatagaagtggatgctcataatcatctactggatggaacacaggacccccagtggaggagctagagaaagtacccaaggagctgaaggggtctgcaaccctataggtggtacaacaatatgaactaaccagttcccccagagcttgtgtctctagctgcatatgtagcagaagatggcctagtcagtcatcactgggaagagaggcccccttggtcttgcaaactttatatgccccagtacagaggaacaccagggccaagaaggagtgggttggtaggagacagtggtggtggggttagacggtataggggactttcggtatagcatttgaaatgtaaatgaagaaaatatctaataaataattgaaaaaaagagaaaaatttatcattagctgtttaaaatcataaaaaatagaagtaacttataatagttttatgccaatttaattcttgcaaaaatgaccaactaaaagcagttattttgaaaatacaaaacgttcacaataagagaatttgtatagaacattaaattaaaaaatacttacaaaataagttataaacatcttatgggtattttaattttttcaaaatttataaagttataatatcaataaatttattagttcatgttggacaaatcttgacttgaacaacaaaattaaaacttaaattgatttgctacttaaaatgtgtatatgtctattttaaggtaaataaaattcagagtagttcagtaagttcacaatgagcctgtgaactgaagactctgttctacaattaaatgtactgatagaacaaacgtaatgagtgttatatatgttagtattcatgtttgaaaaaaaaatcaaagaataaaattatatttcattctttttattatatgtcaataaataagaaaaataaatgactaatatacagaatcagtggaaaatattttcttaattaggaagttagaaacactgttttgtataattggaaaatagcaagtttttcgtgttgtatacatgttttatttcttgaaaactctctatatattattgttgtttaaaattgtttaaaatgttttacataggtctaagaaatttggaccagaaaaataaaataaaagtagagaaaataaaattgatgaataatgtgttttatgcatatcccataattgtattctttgaattaaaatatattacttcaaatgtatacacatatatctggttagagaaaaataagcacatcaaatttaaaaatatatgaaagcatcacaattatgtttagaaagcaaagcagaaggaaattttataaatagggtatagtcccatcatattaataaatatttaaaattctgtgtatcttataagaaaaacaaacaaacaaacaaagaaagcaaaagatctggacaaagcaaagcaaaagttgttcatgtctgactaataatgggagagaggatgctgttgttgggagaaggtgttctcctataacattttacattcaagagagagtaggggagagcaacagattggcaatacatacaggatacagggaaaagaagagagaaaatggagatgaggagggaggagacagaagagagagaggaaaaagaagagagagaggagagaagggagagaagacagaggagagagaagagagtggacagagaggaaagaggagagagacaagaaatgagaaaggaagagagaagccggagaaaaccaacaggagagtgatacaagcgaaaagagtcctaggtaatatggcattttgaagcaatgaaaaaacaaacaaacaaacaaacaaacaaacaaacctggttactccttaatgagggtgaggcaaatgaaagaataggtactatcctcttgtcttgcacagcagtgtcaatattcccaacagatactttgttcttttctatatccatcataaattctttctgttacttttctgacagtatagagagtaaagaaaactaacgtcttgtaataataccattcatctaccattaggatgttgttctgttcttaatctttgtgtatgtgtgtgtgcgtgtgtgcgtgtgtgtgtgtgtgtgtgtgtgtgtgtgtgtgtgtgtgtgtgtgtgtgtatgtgtatgcacacatgtgtggacatgccatatcgtgcctttggaggtcagaagacaacttttagtagtttacttttcagctggagacaggtctctttcaagttagctattacattacaactccagactagctggctgctgagtttgtggatgtttctcctggcctggcctaacatctgtttgtagtagtaccgaccacagatgtaccttacctcattacccttagttttgtattgttgctggttttctgttttcttgttttgtttttattgtttgtttgttttttgttttgttttcaacaacaaggaatgaaacttgggttgtggagccattatgtctaatgcttttatccactgaacatctactggcccttctgtacacaacttcttcatcactgaattcatacttgaccacaagttatagttcttgtacattacaatcaaaattgcattgttaataatggtcatgctaacaatttcattatgctgatatttatttgcttctcaaatccataggtcagtttgtattatatcagttttttatctttatagataacagttggggggcaactctgtgcatatccactctttggtactgtgggctttagatttaggtttcattgtgggtgagcaaggacctgctttgttttttagccattttattgccttatccttttttatgctgttctacagaaaaacataaagatgttgatttttttcttttctcctttttccttgaaaattactggttttatttagtatttaaaagttttaagaaagaaggcagattatttttgttaagtgagtccataaggcaagcaattacagatatttttacatggactaatcagtatcctctaatcaagtggcagctgcatttactaaagctgtttggctcacacatataactaagtctaaaggagtgtacttaacttctcttacattcctcctttttcagaccttgtaactaagagttgatttttatttcttccaccaaaagctcagttttggaggaattccagtaccaagtaaacctgggacctttttaaagaaaaacttccaaggctgtattgaaaacctttactacaatggagtgaacataattgacttggctaaaagacgcaagcatcagatctactccgtggtaagtcaccatctctgttatctggccgtttgtggattttagataagttttacttctgatactctgtatctcttcacactgggtttatattatgcaattagagtttggtcagccaaatctaagtatgaagttcagttgagacactgcctacctagcatgcatgaaaccctgggttccatccctgacacaatataaaagcaggtattttagttacctttttaacttgcttgaaaagtagcaatttaacatcagaaggcttaattctggctgatagtatgagagaatacatttcatcatggaagcaaagactgcatttactaaagctgtttggctcacacatacaactaacattcctctttttcagagcttgtaaggaagagttacagtaaaagtaggaggctggctggtgacattgcataactaattaagaggcagagtgatcaggacttgtgaccagtctgtgaaacctgtagcccatctataagtgaccatcctacagcaaagtcctacctccttaaggttccacaatcttatcaaacagggataccccctggatactaaacattcacctatgtgaaactgtgaggaatatttcatactcagactacagttgacatggtgttgcaggcctataatcacagcacgtgggaggagaaagccagcagatcataagtttaagtcatattttattacatagcaactctgagacaaggctttgctatattaggccctgcttcaaaaattaaaaatgaaataaaacaattctgatatttttagctgactttagagtgcaaatgaaccatgtaaggactgtgaatcatttcattgtttcagctacagaggttcatagaatgctgctttattggctgtgaggaagatttgagatctatgcagactaatatggcatttctttacaatttctaagaagtgcaatgaaagcaccattcctgttgaattccataggtaggacattgaatgtctaccaattggttatattaaataggacattttaaatgctactgcactgttagtgtcttagggattcattgtgtaagacttataatcccagtggattaaagaattttctaattcactaacatctattttctgttacacatcagaagtagtatcaggagtctttaaaaaatttatccttgaatttctcctccatcctccaactgctcctatatctttctgttctcccttttaaatttacagcctttttcctttagttattattaaacacacacacacatttgtacacacacacacacacacacacacacacacacacacacacacaaaacctactgagtccatttattgttactcctatctttgtaggatgaactgcttgagtttggacaaccaatcaaggagtttggccctggagaagacttatggtctctctcagcagccattaatttgttgaagctcttcatatagtaagatttccaaaatttggattggcatatcaactggtattttcactgtgcaggctttgcttaggagttgtattgtggagattgatgggtacagcttccttgacatatatagacaacacaatcacatgtcagatgttctaggtgtgtgtgtgtgtgtgtgtgtgtgtgtgtgtgtgtgtgtgtgtgtgtgagagagagagagagagagagagagagagagataagtacttaggtaatctcttttcagtatttgaattttataggttttttttcccattgttttccttttaagttgtctgtatcattggtttttgttgttgttgttgacaaaaaatagttgtgttataaattttaatcagtaaaaggcgaaagatttatacccattggacacgcaaactttatatgccccagtacaggggaacgccagggccaaaaagggggagtgggtgggtaggggagtggggatgggtggggatgggggactttttagtatagcattggaaatgtaaatgagctaaatacctaataaaaatggaaaaaaaagttaatcacattcccacatctaaaaaaaaaaaaaaaatttaatcagaactcaaaaattcatttggcatacttgtgcctttttaatttaattcaattattggtatgtgagagcataaatatttattatagttattgttttctgttcattttgttgtttttatttttccctctactttataaaataatatgtgttgagtaaattttagaattttattttggcatgtcagtgtatctcttcatagcttttgttctgtggtttctcaggtgttataatgtatggaaataaattctcaaagcttaatacccttataatctaaaactgtaattaaaatattaccttttaaaaatgcatctatcctactcttacttttatataattatgtcaattattnnnnnnnnnnnnnnnnnnnnnnnnnnnnnnnnnnnnnnnnnnncttgtaattaagatctaaattagttggtttggcttttgcttaaactttccaaaataatttggaatatttaagagaagatatgtatatatatgtgtgtatatatatatatatatatatatatatatatatatatacacacacacacacacacacacacacacacatacatacatgtacttgtgatatgatttgatatttagaaagaaaggcgagagtgcaatagcataatgtgaagcacaagggaagatacaagacaggcagaatgacacttgactcataatggggaatgtaatgctcctggcccaaatgtcaactgtgcccatagctgatttggtctgagtttccttgttgtggttttgagaattgaattttatctctagtgtagcattgcaagagccagtgttgcaaaagaatataatgtggtatgcttctgaggcagtgattgtgaaagctagacttgctctttagtgccattgaccattagacagcactagtcactgaatacatttgtcacattgattacacacacacacacacacacacacacacacacacacacacacacacacatatatatatatatatagttattataatttttataataacagaatagatcagtgaatcaccatccccaacctcaagctttgctatagagaaatagtgataaaaactgcaaggtattgtgtaatatccaaaataagttcaataccacctagccccttcccctctgaagggactttcagaaatatagctgtcaaaatgactgagtttacagctgtcaaacaaaatgagctgttctcagaaaaataatcataacaagatagcagttcccagagaaaatcccctagcctgccccacactgaattctgagaaaaaaacacaaactgccctgaccttgtcaatagctgtgatgttaatagctgtgacattaatagctgactcataagttcaaaatgtaccactcctttgctgacaaaatcacaataacctaacatgggggcaggcaaagtgagtcactaggccaaagggttacttagtcaccctagagaaaccaaccaattcctgatagggttacttgctacatcaataagaataagccagttatcccgttgcctaaatctgccccttacaaggtataaatgtgtaatctttctttgatctgggtctctcctcttgcctgtgtgctgagaggggggtccccaacatgctggatcaataaaaaaaaatcctcttgaggtttttagcagtggcagtctctgtgttttttgtgaatgagggtattttgacgaactccaaaaattgttacagaaacagacattttgatcaatggaatataattgatgacccagaaataaaaccacccattgacaggcagttgatctttgacaaagaagtcaaacaaatacaatagaaaaaaaaagaaagcaccttcaataaatggtgctgatataactagctgttgatatgtacaaaaatgaaaatagacacatatttgtcaccttgcacaaagcttaattccaagtggatcaaggacctcaacataaaacctgatatattgaatctaatagaaaaagaagaggaaaagaaccttgaactcattggcacagggagaaatttcctaaacagacttccaaaggctcatgcttttagatcaaaaattgataaatgggactccatgaaactcgaaagcaaaagatatagccagtaagacaaatcagcaacctacagattggggaaaaaaaaaaaaaacttcactaacctcacctctgatagagggttaatatgcaaaatatataaagaactcaagaagctaactaccaaaataactcaaacaacccaatcaaaaaatggtgtatagaactaaacagataattcacaacagaggaatcttgaatggctgagaaatactgaaagaaatgttcaaagtccttagtgatcagagaaatgcaaatcaaaaccatcatgtgatttcaccttacaccaatcataatggctaagatcaaaacctcaggcaacagcacatttttggcaaggatgtggaaaaggaggaatactcctccattgttggtgggattgcaaacttgtataatcattctggaaatcaatctggaggtttctcagaaaattggatatatatctaaatgaacacccagaaataccactcatgggaatatacccaagagatgtctcaccatgtcacaggggcacatgttccagtatgatcatagcaaccttttttgtgatagccagaaattggaaactactcagatgtcccacaacagaagaatgcatttaaaaaaatatggttcatttacacaattgaattctcctcagctattaagaatgaggacatcctgagttgtgcaggcagatggatagaactagaaaaaaaattcttaaagagttatgaaaaagtaaagagctgtgttcgctatctatagtttccaaccaaagttaggaattcctttagataaaaactctaaaagagctatgaaaaattctaaaagaagtgttttcactctccagagatctccacacagctgatccagataaatactctagcaagaactcttctcttgctagaaacaaatatttaaaataactactggggctggagagtgtgattggtgtttaagagcactgtctactcttccagaggtcttgagttcaattcccagcaaccacatgacagatcaaagccacttgtaatgggattaaatgccctcttctggtgtgtctcaagagaaagactgagtactcacatacataaaacaagtaaatctttaaaaacaaaacaaagcaaagcaaaaaaaaaaaaaaaaaaacaaaataaaacaaacaattgctatcattttctgctagtttgtcaactcatctcctgtagacaaaaagctcagtctttcatttacatatcaatttagtcatttaccccaagttcctttagggctgtcccataaatcagaaattcatgccctagcctcttgacacttaagaaataacagtgtgtgtgtgtgtgtgtgtgtgtgtgtatgtggtatgtgtgctataatattgcaaatgaattcagagatctgcctgcctttataagcacaaaccttaaattttgctggaggaatcctgtcctgcaattacttttctaaccattccaggagaaaattttgctctgttccaggatgacattgaattcaggaatctacccacatttgtataagtctgcctttgtatctttccaataaactggctcgaagtgcagctgacttttcttttaggtcatgaagcccctaatataattcatgttgcctctttatattttgcattattgagaaattttatttatatatttctgaactcatgttttcagtgttctttcccacatccttatgggctttcctgaaggtcacagcatttaccatttttgttaaggttatagagaaaccttcacctccaggatttttgatgtgatacacacacacacacaaacttcatgccctgtaactaccaacactcatggctgtgatctaggaacaggaaactgggtcacaccatcctgtcaaaatggccaagcagaattcgtcaaggaaaaacggatgttttattatattataaaagtcatatttaaacctttcgtttaaaatatatttagatgacttggtctaaatggagtagagaaaagttcaactttaatagacttatagggatatatatatgtgtatatacacatatatatatataaatttttactagccttcatcaaaacttggagatataatgctactttttactgccagatatatgggatccctcttacattatttcttatagatatctggctaggataagagcaaaaaaaaaaaaaaaactgattgctgtacccgtgtgattctccagtaacctttggttaccaaaaatctgtaaagtgagtcctcactttccataaagccatattgacactactctacagtgagaggacaggtccttcaattcccctgaattaactacaaacctaagttcttcatcaaatctttattgataacacaaagaaaaactttgtagtggccataaaggatgacattctttgattcttgggattacttttttttcttatttcagacatacttaccctgatggttctttcctgaatatatgagaacaagaacttaacacatttttgtgcagcctggctgagtggaaattgctcaaagttactttgtactatttattttttttgccaagtctgacttggctatgtaaggaacaatatgacatggttttctgccactggaacaaagccagcagggcatgagcctccacacgtgttgatgttggctttgggtacaagggttggttttataatagtgtacatattttgaagttcctccttttaggaatgtttttctctgccaaggttaatgactccatgataatcagagacagcatgagtctggaaggcaagcgcatgtttatgtctcagtcaaatggtagagttctgtgacttctagacaatcccttaagggtgtgagaaagaatgctgaaaacctgagtttaaaaatatataatttctcaactatgaaaaatataaggctgcattatgaattgtgttatgctgttccctttgccaggcaatggctgagtgaattatctttgcaatgataaataatacttgtttttttgagggaggggtgtaccaccataattgatttttatttgttcttcagaactatagtaataaaaacagcagggcactgatataaagacagaaaggaagtctatcctcccattttcatttatttttgacaaaggagccaacagtacatattggagaaatatcaacatcaacaaatgtacctgtgcagactgatgactggataaactacagtatttaaagaaactagtgagttcctttgtttgataaatataacctataggagacatagtttgtttagggattccatgttattgcatttcttaaaatttactgttgaattctagaacatatagtggaaatatttgaggaaacttatatttggacaaagagtgtcagcttttaaaacaatttgtaccgtattcttggctccttagtttggaagatttataatgttgttaagaagatggtattccctgactggatatggaatgctgtgtaataatacctggtcatcagtaggtcacacttaagattcctgaaaagtttctcacttattcgtgaaagcttatattattcatcttacttaagtaatcattggctttctaattatatttctagttgctaacactggggtcagtcttgtgatttgaataagaatgcctcctccctcccctgtaggcatatatccagttggtggaattttttgggagggattaggatgtatggctttgttggtggaggtgtgtcattggatacaatctttaatatctcaaaagatgcatgccattcctgtaggggaaggggtgttgcctaatttcctgaagaagaagagggttgtagcatttcacctttaatgatgagatatgtaaaattcagtcactaaataatcagaataacttaaagtaaaatataatagagtgaggaaaggcaatatgggtttccggatgtctaaaacctttgtattattcccttaattggttaatcctgaatgaaaatgctagcaaatattttataatctttacaataactgcattgtttactagattttgagaaacctttcttgtatatttcagtcctcagggcataactggatatgtagttattatgaggcactgagagccatttaggactaatgcacctgtgaagaaagatttaaactaagaatacaatttttttcttcaggtacaagaatcttagcttttgcctgtataatataaagaaaggaacatacattattttccttctagattgcttctatttcttttattaaataagaacccacctctaccccatacatacatacatacatatatatatatatatatatatatatatatatatatatatatatatatatatagtctatttctttggcatttcttctaagatgtaatgtaattgctcacactattaaatacaaaaacacaattactttctccttgtagtcatgcttaatatttctcccaaaggcaccaccacatctgcctcaaagacaacttttgtttgctgttaagaattctagaaaaaaaattaagattctgttttctgtgtattgtgtattttccaattatcttgcagttgttgagccttcagaagttcagggtttatcacaaaattcataggattaaggaataaggtagagagggttagttggtgttcataaatgacaagttgtagctcaatgctcaaggaaatgaaggcctctctatgcctcacagagcacaaacttttttactaggctttgttcagacagcattttcccagcaatccatcatccatttctcatgggacctgcttactcactggagatttaagagctgttacatggggataattcaatttagtccttataactccatttgactgcagaatgatcagccacattttagaatgcaataaaactaacagcttaaagcagacataaaaaatacttagctattcttccccaagtccactacactgtgctaatacagctgcatataataaataaacaacgactaaatggcccaatgaaatgtgtgtgtaatgtggattattatatacataatataggaagcatattgtcctgatggcttttggaggatgattaattaaaatccctatgatttacaaagaatgatgttttcttgttgccattcttttgtgagtgtaagatttttttctttgacacaagaagagtaaaatgattatttggctattggcagaagtcctgatcttttcatgaagggcttcaaattattttatccttctttatttttaagtgaacataggagctcagttctgaatacatagttaaatttttaaaaatgtatgatttgtaagaaccagggagctcagactcctctctagaaacaacataagaaaaacaaaacaatcagttataaatagtggtatgagcctgtaaaaccagtgctggggacatagaaactggaagatccctagagctcactgactaaccagtctggttgttggtgaatttcaagagattgagagaatctctctctctctctctctctgtctctctgtctctgtttctctctctctctctctctctctctctctctctctctctctctctctctctgtctgtctaaaataaaaataaaaaagaagttggcattgataggttatttttctgccaatgaaaagagacaattttagccagattagaatatattgaaggcatgtttgttgggtagctgctcttgagcagatgaattcactgaccccaaggaaggaggttagggaagttgccgcaggaagtgggggtgagagaaaggacatgtgtgtctagagaaaagaagaagaagggaaagggaaagagggaaagatggagagagagggagagatgaagagagagagaaggaaggagagagggggacagatggaaagagagatagagagaagtggagagagacagggagagagagacagctgggaaggtaggaaggagcttctggggaaatggcagcccaagtcatgggctggaaagttcagtcttgaggtcacatgccagggagggactgaagaatgctagcagaacatggagacctgtttctataagaaaaatatgcatgacagttccttgatctagggcctgaaaccaaacagacaatacctaagaaacaacactccaatctaggatatgacctatagatgtgtgtacagatattatcattcagatgcacattcaacatgaagggctcatgttccttagctctctttcatccaagagaagaaaaagacaattagctaaaagcaatcctacatgctatggaattagcagtgcagcccattgatgaagtcaaattgcttgagtgtggctctccctagatagctgaagtcaagacactggatgaacagaggccaactataaacatgtaccctgctcatcccttctatgtggctaaaactgcagaagaatcacaacaaaatgtacctttccatttattttagatgaagcttattggttcactcaaccagaattcccataaataatttttctgacactctgtagagaagtatagtggttccatgaatggctcagttgtgaagccttccttgggcaaaggacatactggtggtgcccttaactgaaaagtgggagaattagagtatctcttttttagtgttgatgtgcatgtaaaatcctttaaccatggatagaacaatttgtagttgatagtgattaccttgatacctcattaacatggagaaatccaggtatttatgctactgtgatccagtgcccatggaccttggtcctcagttggctgtccagttacttgttcaagagcatgtaggagcaggtagagaatggctccactcctgagatccctgggtttgagctcatcatcatggccttcttataacacgattccacgtgtcctacacaggaatagggccatatatagtttctatgcttttgactgcatctaaatgctagtttgtccatgaactgtatgaattacaaagtgttttttaatagccaaattttttttttacaatttattctctctcttttagttggagaaatttaatgatcaattcaatcttgatttgactgaatgattgactcctataaccaaagactttttggaatacaatcatagaaaatgttttctgatgcacttgagaaaactagaaatataaatgaataggcagtgggcatttgtgaagtttgtcattatttgtctggatgcatgttggcatgaaagttaatgatgtgtagatgtttatttttggtagctttatagccaagaaaaactacaacttataggtaagtgtgcaaatatatggaggcttataggaatctgtgcaagtgcatacacacacatacagacagatacacagagaaacagaaacagacacacacagagagacacacagaaccacacacactctaacaaacacacacacacactccaacacatacacacacacacacacacacacacacacacacacacacacacatacacacagagagccaaacaaacacacagacaagcacagacagacacagacacatacactcaggcacacacatatacacatgcatgtgcagaaatatgagatgctcatcaatgttacacagacgcaactctcttctatgtagtgaagcctatattctcctcatcttgtccctgggatcatgtttcatctctgtgagtgtcctctgtgataatgacactttccctttatgattgctgtcttcctctgccttttgaccagtctgatagttacattgcctgactttcagctgtgtactcctcagaccctggggaaaatgatttcaaagttgtttgcttcccgagtcttacttcctttggaaattgagatgaaatagttcaaggtcagaggaagaataatgcatctgaaagttaaataaaaataaaataagtgaacagttggatggccattattttaactcatttgggcagctagaatgaaaattcataaagcaagtggcctataaacaactgcaatttatttctgacagttcttcaggctggaaactgggatctcagagtgcagtatgttgagtattgagatggtcatcttctggtcttatgatattctattcaggtcttcacagggcaaaagttctaatcatggtctagtcacctcctagaagacctccttcttaaaaccatctctttagtattttgagagttcttagggtcagagtctgaactctgatggtcctagcaagccatggtaagacatatattctcaatgtgccaatcacacttaattaacaaattaaaacaagcaatagagaaaagctggggaagaagatttattcaatatgaccacattcagaagggtaacaaagaagaacattggtcccccctaagtccacttttggaatactgacatgtagtttagatataaacacagagcagaagttgtgcatagctaaatggtcctggatcaaggttgtggtcctgatgagcattaacctagtagcatcagaagtccagactctcccacacaggtgtttgttaatatgccaacattctatgagatgtcttcctaggagacaggttcctcctctgactgtgaccatgtgtcagatttttcttagttcagcatgagttttagggaattccaatttcttttttcttttttaagatttatttattatatgcaagtaaactgtagctgtcttcagacacacaagaagagggcatcagatctcattacaaatggttgtgagccaccatgtggttgctgggatttgaactcaggatctctggaagagcaatcagtgctctcaacccctgagccatctctccagcccaggggattccaatttcttaggaaccattttaaattttcttatatccaaaggcaggaacacagaatctaaaagtcttttttaaggctatattttacttaaaatattttcaataacttcaacattttcatcaaaagttcaaaatctatttaaatattattaaaacattgcattagctcatctttatttcattaaaggtcaacggcctgatgcttaagttgcttaggtttctattgccaaaagaaaagttgaaagaactaccatgatttaaaacaactttcttaaatctaagcagttatatgaaaattaaaattattaggtcacacttttgtgttgttttgttttgatttttttttgtttgttttgattttgctggttcgttttttttttgttttttgttttttgttttttgatttggtttttcaagacagggtttctctgtatagccctagcagtcctagaactcactttgtagaccaggctggccttgaactcagaaatccgagtgcctctgcctcctgagtgctgggattaaaggcgtgcgccaccactctcggcattgttttgatgttttgaaacaaaaccttactatatagcacaaattggcctgaattttcctgtctttgctttcaaagggtggcatcagataagcataccttgaagtttttactaacctgtatgatttaaagtctgtattagctctgtgtagtttagaatctgcattatgccccacagagtctagggaaacatgcacaacctgacacatgaacatgatattgtctggtcatttgaggatttagaatattttaagggaatagcaatacaacaggaattactgtgcatttacttgggaagtagacgctaggggatcctgagttcaaatagcctaggctactagtgagtaagagaccaacctgggcttcatggttgtctgttgaaaagaaagaaacaatgaagagagaaagagggaagagaaagagaaagggataaagaggaatggaaaggaagttaggaaaattgccaaacagaattggaatcacctcagtttttgatatgttttctccaaaacatctgagcacattactccttcattcctcctcctgcagaagagcatacatcgcattttcctctaaagacatgtgtatcagagagctagcttatagagaagaagtgataggttggaatgccactaccacagagacaataaaaaagaaagaggggaggtgattagatatggggacagattgttgcctccatacctcacacaatgtgagacaggctgagagcagccattacaatccatcctttgtagggaagaatagtttacaatcatgtctaggggatgacaatggtatacaggaggagactgtcattcagagcttctttattttcttctggaaagcatgataccttcagttcttattcgtttttatgatgtatcattttttcctgtggtcttgactgaatttcacatcaatgtgcagtgacaaagaaacattcaccagtacatgcacacaaggctggaaagatctacacataatgtagatttgggaattaaagaccaatgaggcatttcagaaatggccttagatgttagctaattacttcaaaatctctcctgggcatttcccaagaaacatatcacatgctttcttaacgctctggtactcttataatgtgaattgaaggttctgaccatagttttaactagcaaatgtctcctagacaattccaggctgagagaaagttcttctaagcaggcgtgtagtatgtacaacattccaagatgaaacagaagcacgaagtttaggactgatgagatgcttcgtggctatggcacttgttgaaaaggcagacatcctgatttggatccatgggatccacataggggaaatgagagaacacctgtgtgtttattctgacctccacatgtgtgctccccatagcaaatgaataaatgtttcatgataccaatagcctagaaagtcagtggacaaaacctaatttgacttctaggataaagtataatatgtagagagtgaagcattaggactggtgtagcccgtgctgcttgctctccagactcatcttcagacctccccaagaacaggtggttagcaggcaaacaggcagcacatgtgacaaagtgcattgatatagaatatacttcctaattttctgtggaatctgtctctagtagacagaaaaagatggggcaaggagatagttcagtttgggaagtacttgacttgtaagcctgaggacctgagtttgatcttcaaaactacaaaagctggactggggcatgcatctctaactccagtacacctacaactggatggtagactgtgacaagagagtcatttaaaagcttgtgggtcagctaactaggagtatataagagacataataagaaagactttacctcaaagagaattaacactcaaaatgtgtcctttaatctccatataaattctgtatcacttgcatgccaccatactcaaatatgcatagcagacacatgcaattcactgtacattcataattataataatattaaaagtgaaggcatagagacatgctctggcaaacccagcactgaggggggaaatggtaatctgacctctggggcttgttgcccagcaatctagcctaattggtgatagtacctgtatcacaaaaccaggtagacaacacctgaggaatggtatcgtacgttgacctctgacatcttcatgtgcatacatgtgtatgcatgtgcattcacttcagtacatattcacatacagacagacatacatgcataaagcacaaaaagaaagtaaatatgtaaactacatgtacagagctacttggcttgccactcaataacaatgatgcggggaaggaacttctcttattccctatagtggcccttggaactcaaagctatcaaaggctaattaatattcagggaactgactctgaagaaaatttaagatggcaaacctcattgtagaaagttcagcaaagaagggcacgtttggctctgaaactcagaaataaataaatatcatatttcctatcacccttttatttgaaaatgtttatttaaaatgatggatctggctacatactgttgaataattgacaattcatagattctgggaaatgagaaaggatattaatatccaacattatctatcagtgagcccactagactagttaatagataattccatacacatcgtcacatacatggtctcagttcagctctatgatacaaacaccaggacaaaaaaaggcatgaatatagaaatatatttgtaggaaaactgacatgatcataagattaaaatgaggaagggagtcatggtaatacatttatatggatataaaaatcacacaattattaataaaaattgaattaaaaaactagaagcctgtgtttctagcagacagaagtatgaagaagaaggtaggcatgtatgtattcatgatttcacatgctgcctgaggaaagttttagaaaacatcatgtgccttattaatgtgtaagaaaccagctctcaactacagttctaaggtcatatgatcagaaaaacctgagattatctaagtttttcacttcaaatatgtggttaagcaatgaagaaactacaatgctcccatttatgagaccccataatttgtctcattaagagaacttcttggttaaattgcccacacactctgttggtgtgcttgtttaagaaaaaccaaaatagctcacttttctgcattatttctgagtttgcaatttttacgacaatctcctcatattctaactaatgattttcctccacggcttaccatcctcatctccaagaatcttcacaattctgtccacacttatctaggagcacagcagctcatccctttctgtaagtcagctcagggcattgcagtttccctcctgctgttggtcaattctcttcccctggtgttgtaaaaacttctaaaatttggtctctttagctaagaaattaaggctgttaaaatgttttcatttttgtctgctttataataatataatttaatatcaaaataaattccactaaaacaataatagtttaaactttagacttaactgattgtgacaatagggatggataggagggcacatgcctctgctcaagcatgggggtcaaagtcaagcacctaaaactcattgatttaaggctagatcgatgagcaaccatgtgtagtctcagtgttcctgaatagaggcaggttgcaaaaccaggagaaaccctgcaagcttgaggcccagttagccttgtgaacagagtagtgtacaacaaaagagaacccgcttccaaaacggtggacagctgtcctgtaacttccacatgcaccatgatgtgcacacacccatacttacacacacattacataaatatagaacagatacaaatacacaaacacacacacacaaagatttttaaaggtaactgattgcttgagtctattcagaagtaaaactatgatcaaagccatggctgagtggactgatgctagtctgataaggcacatttaatagtggtgccaaaagtctcataccctgttacattttggaaataggaattgctctgaaacttaccactgacttgcaatgacacatgcttataaatataatatgtctgcatagaacaaggaatcatttggcatttttgaactttgttattcattattcttattaactattccagtgagtgaaatatcagacagccccagaagacaactttagttttttagacaggttttggtgaatagtctgaatattctgtataaaaggaacataataatcctcaaatctgaagaattgttgaatagcttttccaaaggcattcaaaaaaagagaaagcaaggagctttgtcagggttctaactctgtgtactggctgccaaaatccattaagactaagagacacacttaaaacaaacaaacaaaactatggttttaccaactgctgctgatacagtgtttagcaatctattatgtatttacagaactgtaggactttacataggtatctttgtattcctaatagctatgatgggaggtagcatgtcaccatggttcataaacatactaatattctgggttcatattgcttaaataattttgaaaattcacaaagaactcacctctcacagttcatttaacagttagaatattggtttaaaatgtaaaccactaagctttttttaatgatcaacttctttttattttgtacgtatgtgtatgttttctgtgtctgtgcaccatcccatagaagccaaagaggccacatacactggctgttagcttccgtgaaggtgctgaggattgaatccaggtcatctggacgagcaatcagtgcttgaacaatatagccatcatgccagcaacttagtaagctttgaaaatactaatatttaatttctaccaaatattattgcttgataattatatttgaaaacgaagaaaataatttcttccaattttatcaagtagaaaaccagctacacattgcagatatctgttttgcaaaatcctcctcaaatgcatttgagtatgtgtctgaggtgtttatgtatatgtgtcttgattcatatgtgtaagtatcattgtgtgtatgaagaacagaggtcaaaactaagtgtctctatcactccacacatttttgagacaaagtctctcactgagacttacgtttatcatttcagcaagaccggatggccagcaggctcctaggatcctcttgatctgctgtcccactattgtgacaacagatacatactcaagtttaatgtggatgcagaggatctgaaatcagattctcattcttgccataattcacttattcattaaaccatctccttaacccttcccttttatttatagaagagtgtttttagtactgtctcctgttttcagtaaacatatactagcaggaaatttaaatatctacagattataatctaggttaaatttaagatttgaaatttagatatttatggataatttagtatttctcaaccaaatttctatcaaccatatatatacctgtaaactaaatgtatacaaaaatatgtaagtgtaagaccatatgataggaacaaggttttatcactggtctcttcctttttttctaatttcagcacacatatggcagctcacaactgtccttaatttcagatccaagggatcttctgccccctttagcctccaaaggcattgcatggatgtggtacatgcactgtatcctttagtcatgtatatatgaaagcaagcaaaattgacaaaattgatatgagaaatccccaaatggcagaggggtgttggtagtgcaagggtatgtttatggtttcttgggggtggggcttattttgttcttcttatatacttttgagatgggatttcaaactgtagcctaagatgaactttgatttgtgagaatcctcttgcttcagcctccagaaggcatgaaccactgttcttgacttgtagtttcttttctaaaatatatcatttggtttactgacatactaattgcatgtatacatttatatgcacatggatatgtgcatgtgtgtgcttatatgtgcatgtgtgtatgtgtgtgttgtgtgattgtatatagattcatgtgaacatggaactagacattcagtgttattctcagtagagctcccttaatatatatattgagctcatcactcattaattagctgaacaatatggccttaagccctatgattctcctgtctccacagtgctgagatttaaagcgcacatcaccacccccagctcatttgacatgaaaatcaaacttagatcctcttgcttgcaaggaaaacactttaatgactgagttggcttcccaggccttatcatatactgcctcatcactctatagtaaaatagacagcactagaataaaataagtaaattgagacagtgacataattgaatttacttgctatctagcgccaaaaagaaagcacatggtgctgtcctcatctctaggtatcccccaaccctgggtggggcatcaagcttctacaggataagacacatcctctcccagaaatccctctacgacatgtataccaggggtctcagaccagcctgtgtgttatctttggttagtggctcagtctcttgtagctctgcagggtccagattggttgacactgttgttcttcctatgtggttgccatctccttcagctccttcagtcctccccctaactcttccatagggggccccaacctccatcctatgattgactgtgagtatttgcatttgtctcagacagctgctgggtagatcctctagtagttcagccaagctaggctcttatttgtaagcaacatatagcatcagtaatatattcagagattgatgtctgcttataggatggttcctaagttgggcacatcacaggtcagccattccgtcagtctctgctccagttttgtccctgtatgtttttttttcagaccagagaaattttggatcaaaggttttgtaggttatttgctatccccatccttccaatgggggggggggttcctgtttgactactgaaggtggtctcttcaagttccatatgctgactgttgggcattttgcctaagatcacacacaatgaatcctggggacctcccccatctcaggtctctggaactttgtagtgtggtactccccaaaccttgacagctacatatttccattcattttcctagccttctggggctttctcctgtatccccccttacctgattctgcccctctattgccgtctcccatattgtttcctcccttcctctggctcctgtgattatttaaattccccttgtaagtgggatttaagcatccttacttgggttttcttcttgtttaatttccatgggtttatggggtgtatcattattggggtgggatgaagactatttaagcttaaccctaagtctgatttttaatctctccctccatgtgcaaatgctgaaatcttgctctggattttgttttacactgagggtcaaaattatttgaaaacattaattgctttggatggaattttgtttatcacaccccagagaaaacggtaatgtttaggcgctaaagagagatgtcaaaaattggtgaatcagagacagaagtagcaatgaaagcatggaacctgagaactgtggagctggctgaggctgtgaagtacttgccattaaagcatgaaatcacaaaggtcagtactcagcacctacataaaaatctgggcatggtagtataggcctgtcatcccagagctgaagaggcagagacaagtggagattggggaatgttagccaagtaatctagcccaattcctaagctcaaggttctgtgtcagactttgcctcaaaaataatatggagcgctagcaagcgcataaaggcagtcttcatctgggttctcttctcatgtctcacttagtagaagaaagtaattcactcccacaagcaagctgtccctgatctcagtgtgttatttatggcgtgcacgtgcacgcatgcacacacacacacacacacacacacacacacacacacacacacacacacaacaccaaaggcagcatgtagcttttgtaaacttctgtttgctgtgtctgtaggtgacagggctgacagtccagagcctacaggaatttctctgtccgcttatgccctttgcccattagtggagctctccttacaatatcacagattattttccccttgatgtcccttaactgaatctctgagaagtctcacctacattctcaagtgcctgctttaaaagaaaaaaagcatagtcatcgattgcatgttgatgccaaacatccaagttacttcttgctgttctgtgctgtttccttcaaattatagtggggcacctttcttgtttatgcttcattttttctctcttcatacaaattctcctcccagctcacctccaccctagttttcttcaaagtgtaaatcaaaggaaacttcttgaagccctattttgtggaattacaggaggatgcatgctgcgaccctcacagctctgggtcacagtggtgacaacacaatctctgagattattttgttgtcatgcagagttcagggggctgggggaagttcaaagcatgtgttcatccagacttatgttcttagccagagcaccaagaatgacctggcatgagctgcatatagtccatctgttgaaatataagtgaatttgtgaaggagtctattgttctcccaaacatgaaatggagccttaatttgaattggcaccttccctgaatttgtacgtcaagaagcacatagacagtcattttgtacatttgctggtagcatgctagtcaggcttactggttttcagataaatcaagttagaaattgttatagttctttggggaaaaaaaatcaagaactggctttgaaatcttttgccacaaattaaattgaatcaagataactttttgctcagattataaacgtgtgactggctttgcttaatgttatcatgattgaagcttggctttgcactgctaggtttatttttaacacagcaatgtgtttcagtgcttggatggtggttaggaagacaacaaacacctacaatgaatattcttcgtaaataatatttcagcacagtgatagaattctgcaaatagcccttctaacaacatctaaaatcagttaaagtaaggaaaaattcaaacttggtctgctgcgttttcttggggaagtgttgtcttaaaaattagagtcaaggactgaaatgtggctcagcagctgagagtttctactactcttacagaggacatggatttgtttcctagaattcacataaggcttttcacatcagaatgtaactctagcaccataacaattctccagtgaactgctgcattcatgtgcagaaatacatccatacaattaaaaaaagtcttaacaaaaatgtatcagccacgtgtgacttttcacctccagtcctagccaaaaatgagagtaggggatgtcaccagatttcatcgtgactagatttagggaggtccagggacagagagctataaatctgccttccatgtgtctacctagtccttgaagcttctatcttagtaactagtctacttaaacttgatcagagctcattgtgattttgatcctgagcctttcaaaaatagtgatcagattcattgtactttttgtgtactgctacctgactcaaatcaaccctaggagtttattgctaatgaaattataggtgtttgagtggtgaaattgttttgaacatatttgagatttccagtgcacctgacaaagtttgccagctcttattacctaagccgtagtattagaggaatgacacatgattggaaatacaattgaaaattgtttattaagaaagaggaatacactgatgatctaagagtaaaaccctgaagcactgggccacaggggcacaagatttaaaacatattattgaatattcatataatttcacctttcccctgtttatttaccctaggttcaagttgtgcatactctgttttttgagaatagtttctagtctctctcaggcaatgggcttattttacatcctatttttgatgtttccctccctattcttacacctttttcatggagtgaagcttccaagacagaagtgaatagaggagggttgtgaacaaacagtcaaattgaaaatgactgaagattattgattttgctctctttaacttttatttattgggtatgttaagaacatcatttaaagcaaggaatatgacagctttatttattttgaaatatttacttatgttttatatatatataggcactagtggaacgttcagtcagctatcttgaattggtagggttaaagtagtactataggtcaataaacacatgtaaactcaaagtgctagcagggctaacatagtctattctgtgcagcctctagggtttgggggcaaactggggacagaggtttacagagattgttttaacacatgatcaggctctatcactactaagtttatgaaagaacagttctcattctcaaaagggcagttatctcagaattttggaatagattagtgggaagtttctgagcctggacatgtttcttcttttagcatagattctttgaaagagtcacagagtagaaacttgctctgcacatttcttttgaattttccatcatgcttgacctcctatattcctgctaacacactattttaattagcataaaatgttataaatttttaatgtataaaatattttacactaagacacctgtagttcatgttataggattaattttgtaccttcattattttcaatacatagatcatgcactgtgattactctcttccccaagctcttttatttcctttcaattcctgccaagcctcatctcttccctaccttcctcttgtcaagattcatgatttgtgtgtgtgtgtgtgtgtgtgtgtgtgtgtgtgtgtgtgtgtggtgttttaaaaccagtaagtgtaatcaagggtatctgtgtgatcattgacttggaaatatcctttagagcaaggcaggattaagactggcaaacacgtcatggacacaccagccatcagttctatagagttgaaatagcaaacacaaatcagcagtggtggcactacttagcagagactgccaggcttcaccctcagcaggagggaccagaaggaaagtaaagagaagttctcagctgtgcctctcagtgaagtgaagatcagtgaagacatgaagccaacaagcatttagctattcaagcaagcctagctaatccaccatcactgtctgtcaggccctatttatattccctccaaacatcatgtatcctctatgggtcctgcctcagtacatgcatttttctcagctgacatcactctgctgatcagcttgggtccagggaagcaacaagaaactttgacacaccacctaaagtatttttgatgtgtttctctctttggaatcccaacaaatgaagctgaactacataaagtatgccagaccactgtggttagaaaagaatccttcatcatatgtcctttcatatgcttgccttatccaatattaacttgtgaactgaactgccaatttccagacaacacagttggagttgctccaaagaaacatctaaacagatacacttctcccctgacctttcttttccactgcctctgatgggtggtgggctaaaaggaaggttaaagaatttaagaaccatgattaaaaataggcttacaaaaataaatttatatataaatgtcttttttattctcaggatcttgtacactcttgggtctcttcattcaccattattcaatgtaaggagaagtttctctgatcacaattaaaagtaccatttgtttgtggatataaatgcatataaattggaagacagtttgatgatatttcaatttagttaaacattcagttttccctatggcctatgttttccattcagtattcccaggctatggttgtctgaccaggtttatagtgcgaggaatatatttttccttcaatcgagtcataaaggggttaacactgtaacatattacctggctgattgtttgcatatttcatagggttcacagctgtgtaagactgctgatggcttttctcccccaactgtatacatgacttcttctgagactctgaaagttaaacttcagggaggaagtttacaactcacttctagcttgatttctctatatcatgaaaataaggtattaatatactattaagttgcacgtgaaacaatatgacaggccaagagagaatgaagtatcactgggcgtttctatcctttagcataggcagttacagaggactgggcagagggaggaagacgttattgtcaaagctttgatcgccttacattctggaactcaaaaaatgttaactcttattttttctgtgtctttttcaatccattctgttccaaatgggtactgttctattctttacaaatgtctctcagaattctcagttctaccagctatttttctcagcttaataagttataattataatctatcctgcagtctagtgaaagggcctgttaaccaatgaacctatgatgcatgctggtgaagaatgtgtttaaaatttcagcagcaggggtggaaccatatctctatagcctcactagcagacacacattttcttttcagagaactcgattcagaccattcccaagatttatagtttaattgagaaaatactttcaggataacccaatatgaggtatagttgaagacttattaaagatagaaagaatagaactctaaaaaacacaatactagcataggcatgcagttctcaaaggcaaatcatgtgtaggtatctttaaatgtccacataaaggatttgggtagctaaaatttgcagtaaaaaaatgtgctgttgtagaccaatttctgagatagatttatgaagagctttgtctagatttatgaatgacatggaactaaaacatgcactcaaggtttttgttcagtttagtagtagttagcgtgtttattgtctttgatatctctgattgagagaactctagaatctttcaggatcctatgtttgcctcagtgggcaatttcaggtttatcaatagtatcagaaggttcttaactctgtcttcaggaaagataaaccagacttatctttgttgcctgaactgttaacaaataagaccatgtcaatgttatagggtctcagaatagcatcatcttctgactgatgcttatgcttggaagatcagtgccaatgcatttgatttatgctgaagtgtccagtcacagagatagtaatggtactcagtcctccctgttagaatgttcgtgaacaaaagctgttgtcatgatattccacctatcaatcatgaggaaatcactattattatattactagaagatgtctgttttgataattccctctgccacagttgaaagattttagtacagaatgcacaagatacagtccacagaactgaaaaatgtcaacaagctgaagggcccaagtgaggaccccctcaatcccacttgggagggagaagaaggcaatcaaaagggtcagaggagggagggacctgggagggaaagtggatgggggtgaagagaggaacctgatctggtattgcttgagggaaaaagactgaagccctgagggccagcagaaaatatggaaacaggcaatctcaggaaataggagattgaggggaccctccagaatgcaccagagactctcaggaagataaggtactctcaggactcaaacgttgggatcttaggataaaatgcctgacagtagggaaaggggacatatatagcccaccttcagcaggaagacaggacatccagtgagggatggggtttcctgtctgaaagaattacagggatggaatggactcttgctttcttaggaaccatcattcttctatttttctattttccttgtcaaatgctttatgttgggacatgaaggaaagggaatcttggcaagcactctccaaatcctatcggctcctgtaacaataggccattagaaatgaatacagatcaatcttgatttaaattttgagaagaaattgagagtattgaattttggtataagagcattctggtcatgaatacttactagtcattgatatttaaatgtgggaaacactgctttttcatattttcatttatttcctactgtgttaggcaaatggtttcacagaacttaatttctatggaaaaaatgcctataatattggtcatgtctggccctctgtttacctaggtcttacatgagttctcttttttataacttaggctgttggagcagagagttcttggattctcacaggttcccacattctagagactgaacaaacttatctttgtcatgtcattttttgtagaggaagtgatatctaaatctttcttttgctaccatgagaaatataattaagtacttacatctttcaagatattttccttggattatactccacataaagaaagaacactaggcttctatcatcaattcctgctgcattgcagaaaatgatccaataatcaatcaatatgaatgataataacacgagtgttcatgcctgcactagtgcatacatgtgaatgtatgtatgcatgcatatgtccctccctccctccaccctctctctctctctctctctctctctctctctctctctctctctgtgtgtatctatctgaacattcctgtgaactataatcatgagagtgataacccttgcttttgtgacagagtgcttcagtgagacttgcgacttacaaatttagttaatcttgctagccaactagtcccagatatactcctaatgtcagctttcagcactgacagtagatatggtatcatactcagctttttatgcaagtgatcagtgtagaatgcagattccccatgtttgaataggaaatactctctcacagtccaatgatacacatagattagtagacggcagcatatcaaatttaaggaacattattttaaatgctctaacccgggaatgacaaccaactgcttagctatttcttctttttttccctctccacactaaaatgttttctcaggagaatgcttgattaatactgaactctatagagaattagaatggagcctgaggaaaaaaagatccagtgacaggcccaaaggaggatccagcacaaggggaagtcccaaggcctgaaactcttactgaggctatggagcacttacaaaaaggacttatcatgactgctctctgaaagacccaacaggcagctgaaagaatcagatacagatatttgtacccaaccaatggacagaagcagctgacccctgttgttgaattagggaaggctgaaagtagctgaggagatgggctattttgtaggaggactagcagtctcaattaatctggacccctgagatctctcaaaaactggaccaccaaatggacagcatacaccagctgatgtgaggcccccaacaatacagaagatgactttcaggtctgtgttcattctgagatgattcacttaaccctcaaacagacaggaggccctagggaatttagaggtcaggtggggtagggggtgggggcatccacgtggagacaggggttggggaggatgtatgggatgtggaatagttggagggtggatcaggggtgagggaataaaatatggagtgtataatataaaaaaataaaaagtaaaaatgaaaaataaaagaaaggaaatggccatgctgagaatgggagtgagaactagtgtgttggttatacttggtcaatgcaacacaaatccatattaccttggaaaaggaatccttatctgaggaactacccccatcagactggccagtagacaagtctgtgggggcatttattgactaagatttatattagagaactcagtcccttgtaggtggtgcaattcatgggcgctttggttgtttaaaaaaaacagattaaacaagccatggagagcaagtctgtaagcagctttcctcaaggatttcgggccttattcatggctcctgccttctgccttgaggtactgtcctgacttccctcagtgatagacagataatcataatcacagtgatccagatgtataagtcaagtttctgtgggggaaaatatgtgctcaaaatattcctgggccaagaggctgatgatcttttgtttttcttaaaggacagaatacaccagctgatgtgaggccctctactccattttctggcctttatagtgcaactattttataagtagcccaggtagggaagggtttttagtcttttgtcatctacaagcttcttaatatgttaaccattattgtcatcatcatcttcatcctcacaatcatcataatcactatctcttttctcccacatacacccttactcttctgtcactcgattatatgcttaacatacagcacctgnnnnnnnnnnnnnnnnnnnntttctgtttatttttaattgtgtgtgcgagtgtgtgtgtgtgtgtgtgtgtgtgtgtgtgtgtgtgtgtgtatgccctctactccattttctggcctttatagtgcaactattttataagtagcccaggtagggaagggtttttagtcttttgtcatctacaagcttcttaatatgttaaccattattgtcatcatcatcttcatcctcacaatcatcataatcactatctcttttctcccacatacacccttactcttctgtcactcgattatatgcttaacatacagcacctgcttattttataaagtattgttaggaatatgaaaatatctataggtaaaatataccatacaaaaatcacactgaaataaagcatgttggggattgcaaatggttcaggtgtgggtgaagaagaagactcacttggcaattagaagatattatgcatggtggctgtggaatctggagaggccactggtggtagagaaatcaggctgcaagtgtgcttatgagtcaggttgccatagaaataacttcaagtgacaaatgactgagtttcatttgctatgaagatgtcttcacactttagtaggggtggtataacacacaaacaaagcagaagatagacctttagaagttcagaaccttttgttctttcctgattgaagtttattcattgtgtaagtaatgttatgggagccaggcttctcctcacccaagtgtacctacataggtcctgaaagtaagtgtattatttattttccaccattgctgtttatatgagttagttttatccatagaaacaaccaagataaacacacacacacacacacacacacacacacacacacacacacacacactagtagctcaaagcaaagacaggagcatattcagtgtccccatgtgggcatgaggagaaaagaagtacagggtgtacctcaaatctgtctgtgggatcttttcttgtcagagggttttgaaataaagttactttgtgtggctgtcctggtactcactctatagaaaaggctggcctcaaactaacagagatctgcctagctttatctcctgagtgatgggattaattatgtgtaatgataccatctgtgagacctgaatacaaggtttagatttaaaagtaggataataattatccatagcaaagcacttctgcccattatcattgtctgagattattttgcttgcaaggtggccagaaaagatgtcataacaatgataatcataatcacaatcataatcatgtctctttctcagaaagagaagctcccactctggctgaaattgggcttcatcctttcctttctcccagcctgagattcctggagggatttcagattcctggattccattgtttaattcagacagtagctaaagagagcagtttctcatcctcacattcctaacaggacagtcacatacacacaacagactgaggctgtgctgggctttcttataatgagtttgtcacctaggttatagattctgagatgtatcatgcatgatcttccatttcttaaccagacatacttcaaaacaagaggttagaagaaaattaagaaaatcaatgatgtaactaaatttgaaggggaaaagtttgaggaaactggccaacctagactggtaggctatgtcatagctgatggctagaaatgataagcagaagtggactgaagtttatttccctgcacctatatcaggcaggtcaaaaacacatgtaactacagcacttttccctgtctgtactgtattcacatttgtaaatgtgtgtgcatgcacacacacacacacacacacacacacacacacacacacacacacacactcgcacacacaattaaaaataaacagaaactttataaagcaggtggattcatgtatttatctccttctaagtgcaatcatttctcctcctttacttgtagggggagggactgatactaaaatctggttccctaattgtttcttgtttatgccaataaagatggcataagctaatcgtggggtaaaggtaaagaaaagggatttctgggccccaggaggaagaggcgggaaagaaatagctctttggccaggctttgagagaggagcatgatgtctgggggatactagagccggtagcgtcctctgccacaggcacaattctaatataagacaactgatgagtttagagcagtagattcttcatccagcagttgtattatctggctggttttaaaatactaatattgtctggtgttttccatctgcagagactcagtgagcaagataaagggcataacttgtgtggttcttacaggattggcaaagctagttgctggttagttggtcagtgtagagagactgcagcttcctgatttcatggaaaaaacatgagctagccttttggtggaggtgggtgagatggcctttgctggtaccaggcaagaaacaagcagagactagagcggcttgacaaactagctgtagggcctgagtgagatggctattgctggcaccaagcaaggaataagtgaggattcaaaattacacacaacatttactgtgttgtgacccaatcaatagactgaacaaatgccaaacatttcaatgaagcagatcttagatttttcaaccttcaaacttacaagctacacaaaactcttttcgttgtaaaattctaaactttagagactttgtttttatccttttaaaattatggtgtgtgtatgtgtgtgttgagattttaatatatttacattattttccccttcttttttctgactccaaaccctcccatacacttctttttttaaattcatgttctttttaaattaattgttgtaacacacacaaatacaaaagtacaacaacctgttcaatctctatattatatgtttgcatgctttcaaggttgcccatttgttattggacaaccaactaattgataagctccacctttgggaagacggttttcttcaactttcagcatccattgtttgtctaggtttatttgtacagtgtttatgtctcatgatatttcacctggccacattattgtgactattgttattgccttgctcacctcctgtttgagcagtcatgttggtgagacgttacaagtatagctttgacatttctgtgagacataatgttacagcaaactcttggtactctggctcttataacctttctgccccttcttccacaatgttccctttgcattaggtgcaggagttgtactgaagattttatcctttaggagtcggcttcatagttctgcattttgattcgttgattttttttctataaaggtatctgtctcttacaaagaggagtttcatttgtgtgccttgagaactatatttatctgtagatataagaacaaacatttaggatataggtagtaattgtgcaccttattaaagtgctagttttaggatcttcttcacaatccacgacttcattaggactaaagagttggctaggattttagtatcagacatgattctgctcttattgatttggtcttaagtctaactagacatctgttgactaccaccaaattatgctttacattaatgtacccttagggttattatgccaagctggttgttgatgggattcatgggcataatagttaaataggatttctgagtgcttgttttctttggaagattacatggcactttctggtaccatcaaagttatttgccaaggaggggctttagtttagtttcagcttaggagtccctgaacccttttctagaagtgcatggtatctttagcaataagggcttagtttatacttcagagcccttgttttaacacaatagagcagaataagacaactcagtggttaacattggtgacttgccatgatcttgatccaccaaggagataagtttcaaggcatgtctgaacaatattattttaggattttgggtaggttacctaataagagaagttccactttgaatatcgatagtgctctgatctgagtcttgggctgaataaaaaggagaaagtaagttgaactctaccatccatctgagtctgtttcatgaatgtgaacttaaagtgaccatctgcctcaagttcttgccaccatgcttaccacacctgataatatgtctttcctgtcatgatgtatcatatacccttgaatggctagatggaataaactctttatcctttaagttgtttgttgacagatgtttgaccaaagcaacaagtaaagtaaataatacaaacaagcaggtttagcaatgaatgtgaaggtgctgtcagtctgaaaatcaaaggaacttcctgccacaactatcagttgactgttttggtagctgctctggttgtcatcctgagtcctcaatattcaaattgaactggactgtaagtttgaaatctctaagtaaaggtgtctttttgaacctctattatttttgcatctgtctccctctgatctcccaagaactactccttctacaaagcttcaaattttggttccagtgcaatgctggagaaaaattgttgatataagcaatgataataatatcaggctatggggaaaattaaaattacgaccaactcttagtctctctatggaacgtttgtgactttatttatttcaaaagtaaatgcctgaatagttgggatagtcaatcatacactgggatgtattttttcttgaatatttcagaaatccaaagatgcaaatcgatatataacataatatacagatacttatactacaaaagtagtggaattttaagcacaggaaggaatacaggtgtcagtgataaaatataagcaatacatgggattctttcccacaataaacaccaatataacatatagacttgattctaacttactttttataataaattgttttgtttacatcctaaatgtagtgcctattcctggtgccccttccagtgttctttacaccatgccttcctccttcatctctgggagggtgctgctgcctgttgaattaaattaattatctccgcagtacattcactacccacctcaatggtttaagtttctgaatgaaagatacacaaacacacatattatattttaatatgccttgaacaactcaatagcttggccactgcctaaccttcatgtggttaatctacctcccaccaataatcctgttattacttattaaatttatattctatcttgactgctcttgactgcacttcagtccctcccctaactcttacatagtgatccccaacctcagttcagtggttggctctgagtatctgcaattgtcttagtcagttgcttgtagaacctctcagaagacagctatgctaggtttctgtctacaagtacaacataatttcagtaatactgtcagggtttgtcactggtttgcctttccttcagtctctgctataatttgtccctgcatttatttagacaggaacaattctgggtcaaaaatcttaatggtagtttgtgaccccatccctccactggtgttcctatctaaaggttgtcttcaggttccatcgcatcactgttggacattttactaacgttgtgcctattgagttctttcacatcccaggtctcaggtgctttctataggttctcgccatctcccagcccccattccccctccttctcctgacactttgggttttcttttctgtcttccccatacctgatcctgcctatcatttcccctccaactcttctctcctacccaggttcctccctccatctgcctcccttgattattttgcttgtgcttctgagattgaagcatcctcacttgggccttccttcatgttaaacattttaccatctgttaggttgtataatgagtattctatatttttggctaaaatctggatatcagtgaggacataccatgcatgtctttttggtctgaattacatcattcaggataaaattttctagttccatccatgtgcctacaaaattcatgatgtcttcatttttcacagcttaatagtattcaaccttgtcaatgaacaacattttctgcatccattctttatttgtagaatatgtgggttggttcctgtatctgcctattacaaggatggattccatgatcacagtggatcaactgtcattgtttttatggtggagcattttttggatatatacccaggagcagtatagctgtgccttcaggtagaaccatttccaatttttggagaaactgttagattgctttcaagactggttgtaccagtttgcattcctcccagaaatggagaagtgctcctctttgtccacatccttgccagtatgtgctgtcactagaggtttttatcttagtcattccgattggtataaagtggaatctcagagttgtttttctttgaatttccctgatgattaaggatgttgaatatttctttatatgcttgtcggccattcaaatccccctgtttagaattcaatgtttagctctgtattccatttatttggtttcttggaatctaatgtcttgaattctttatatattttggatatttgccctctatcagatgtagggtcactgaagaccttaccccaatctattggttgccattttgtctgattgatagtgtcctttgtcttgtagaactttttctatttcatgaggtcccatttatcaattattgttcttagagcctgagtgagccgttggtattcttttcaggaaaatttcccatgtgccagtgttttctatgctattttccactttatctcctatttgattcaatgtatctgcttttatattgaggtccttgatccacttggagatttatgcaagatgataaatctggatcaatttttattcttcaacatgttgactgtcagtttcacaagcatggtttattgaagatgctttcggttctcccactgtgtggttttgccttctttgtcaaagatcaagtgttcatagatgtgtggatttatttcgaggtctttagttctaatccattgatcaacctgtctgtctctgtaccaataccatgtagtttttattattattactattactctgtagtgcagcttgagatcagggttaatgacagagcttctggcaaaagttcttttatgtttgagaattgctttcactatcctgggttttttatttttccatatgaagatgagaattggtcatccatgtctgttaaaaaatttgttggaattttgatagggattgaattgaatctgtagattgcttttggtaagatatggtcatttgctttatgttaagaagctgaaattatcacagagaaagcagtctcccttgaggaaatacctccatgagatccagttataaggaatgttctcgattagtgatcaagagggaagggcctagtccattgtggttgatgctacccctaggctggtagtattgggttctgtaagaaagtaatctgaacaagttaggggaagcaagcctgtaagtaatatccctccatggtctttgcctcagcttctgcttccagacctgcttgagttccagtcctgacttcctttagtggtaaacagcaatgtgaaagtgtaagctgaatatagcctttccttctcaagaaatcctgattaagactaattggaaccagtagagtggggtattcctgtgacagcctgaccatgttttagggaggagtgtgaaaggacttttgaaatttgggctagaagagccactgggtgttaagagcaatatgggatgttctgtaggagcttggaagataatattgagaacagtgcaaatgattgattcctggcttatgaaatttcagagggaatagtaaagattcttatcagagcattgatgttttgattgtgaagtttctgtggttttggttagctggggctgaggaattagctgtgattaacaagatactggaactattaaagcaaaacctaggcattattgggactactgatgcaggttagctggaactaagaaattagcggtggatcctccggtagtactatgtccaattttctgaggaaccgccagacgggtttccagagtggttgtacaagcctgcaatcccaccaacaatggaggagtgttcctctttctccacatcctcgccagcatctgctgtcacctgaatttttgatcttagccattctgactggtgtgaggtggaatctcagggttgttttgatttgcatttccctgatgattaaggatgttgaacattttttcaggtgcttctctgccattcggtattcctcaggtgagaattctttgttcagttctgagccccattttttaatggggttatttgcttttctgaagtccaccttcttgagctcttgactctagctgcatatgtatcaaaagatggcctagtcggccatcactggaaagagaggcccattggacacgcaaactttatatgccccagaacaggggaacgccagggccaaaaaggggaagtgggcgggtaggggagtgggggtgggtgggtatgggggacttttggtatagcattggaaatgtaaatgagctaaatacctaatttaaaaaaaaaaagaaagaaagccatgtgcaagcaccgaactaaaaaaaaaagaaaaaaaaaaaaaagaaattagcggtgattagaagataccaagatgtcaatgtttcagattttcttagtaggggcaacaaaatattcacaggaggaaatatggggagaaaatgtagagaagagtctaaagaaaaggccatgcagagattgctacacatagggatctatcccatatacagacacaaatcacagacactattgcagatgccaagaagtgcttgctgaccggaacctgatatagctgtatcctgagaggctctgccaaagccagacaaatacagatgcaaatgcatgcagccaaccattggactgagcacaggaaccacaatggaggagttagggaaaggactgaaggagctaaagaagcttgcaactttataggaagaacaacaatatcaaccaaccagaaccatcagagctgccagggattaaaccactaatcaaagagtacacatggagggacccatggatccagctacgtatgtagcagaggatggccttatctggcatcaatgagaggagaggtcattagtcttatgaaggcttgatgcctcagtttaggggaatgacatggcagtgaggtgaggtgggagtgggttagtaggtaggggagcagcctcatagaagcagggagaagggggagtgtgtgtgtggagggaaagctaagaaagtggataacatttgaaatgtaaataaattaaatatccaataagagagagagagacagagagagagagagagaaagagagagagagagagagagagactagcatcattaaggtgaaaatttttttcttggaagtattactgagagcacaaaaaggatgtgttccagacagagccaaagttgtaccttgtgctgcagctggacttggtaatgtgtaaagggtcaggtggtgctggttttgtaggtatgaaaggctcatgaggaacagctaaggtttggcaatgtcagaggccaaggaaagccatggtgaaaatacagcctcagttgcaattggtggcccaggactgaaggtgtcatgccaaggagttgaggatttgtaccttaaagagagcctatgagaggctgatgctgaagacttgtagcagtggaagtcagcagtgttttggggttgccagtaccacgagatgaccaccaagaacagcagcagcagtgaagtacaggcagatgaaacggagaagacatggtgagtgctactaatggcagaactggaaacattacccaagcccgtgcaggagccgagaaaatcatgagtgaatcccagacattggacagttagagtttaattttccttttgattattccctcttgaaagaagaaagtattttgtagagctcagagttaagagacttttaattgtaaaaagaatttggattttaaaaaagattggatattctaaagggattgaaattttaatatgtaagaatttgtaagattgtgggacttttaaagttatttagatctccaggatgaatagggaagaaagggttgaggcttaataatgatgtatttgtgtgtgaagttgacaagggatccattttactggtttgttttgtatgccaacttgaaacaagctggagttatcagagagaaagtagcttcagttgaggaaatgcctccatgagatcctgatataagccattttctcaattagtgttcaaggggggagggccttgctcattatgggtgatgacatgcctatgctggtagtcctgggttctattagaaagcaagctgagcaagccaggggaagcaagcctgtaaggaacatccctccatggcctctgcctctgctcctgcttcctgacctgcttgaattccaggcctaagttcctttgatgatgaacagcaatgtgataatgtaaggtgaataaacccttccctccacaacttgcttcttggtcatgatggtttgtgcaggaatagaaacactaagagtggtatcttctatgcctgacattctttctactctttcctagcttttccatatccaggtttgccacagtttatgatttctttattgtttctattttcatttttaggtcctggaccattctgttcaattccttcatctttttaattatattttcctatatttttgtaagacatttatttgttttctctatatgggcttctatattttttcctgtgtattcctgtatttcttttttctttgtttctaaatgtttatatatttatttttaaaatatttttattaggtattttcctcatttacatttccaatgctatctcaaaagtcccccataccctcccccccactcctctactcacccactcccacctttggccctggcattcccatgtactggggcatataaagtttgcaagtccaatgggcctctctttccagtgatggccgactaggccatcttttgatacatatgcagctagagtcaagagctcaggggtactggttagttcataatgttgttccacctatagggttgcagatccctttagctccttgggtcctttctctagctcctccattgggggccctgtgatccatccaatagctgaatgtgagcatcgccttctgtgtttgctaggccccagcatagtctcacaagagagagctctatctgggtcttttcagcaaaatcttgctggtgtgtgcaatggtgccagcgtttggaagctgattatgggttggatccccggatatggtggtctctagatggtcaatccttttgtcacagctccaaaccttttctctgtaactccttccatgggtgttttgttcccaattgctgagtaaatagtggattatttcaaaatttgtattgttacaaattcactttggactggttatttgtttacatgaacatacaacaaccataaacaaatgtagttgagacctgggaatgttttatttctatgctatgtaggagtctggagttatatgtttgtgtgactgtgcaggtggaagccatcactcactatgaactttctgcttctgttgcttttcacattaaattttcagaccaggtgtctcctggaaccttgaatttatcaatttatttaaactgactgcctggtcagcaaacatccagaacacatctgtatctagctgcttgttttgggattacagctgcacactgccacacaagcacttttctttggtttctgagaatgtgtacccaggtcagtattctggcatagcaagtagttattcacagaatccaatcctttggatgtctcttctgaaaagtggtgctgtggattagacttttggcttcctgatctgcactaagtatcttgccctgacacttggacactagtggaaactggttgcaagcagctgcctggcatatcctgcttccctgaggaagcctcccttgtttctaccagtgatgttggcatggaaacaagggctagagaaattgagccctgtcaggcacaactgctgttcaatggttatggaaggatgcatctgtggggtaagtgatttgtggcactcattgttgtggagattgggttttagagactaatgtacctaggtagttcaaatgaagacatgccatatttggatgtagagtttgttatataaacacctacaaaagaatccttctgtacccttcaaacagtagtccaggctttcttctatactcctctatagaaaaggccaatagtcttatggaaaacttattttgtgggtcatatatatacatatatatatatgtacatatatatatatacacacatatatatgtatatatatatatatatgtgcatgggtctatatctatatctatatctatatctatatctatatctatatctatatctatatctaactatacatacaggggtctagttctttttttttttggtttttcaagacagggtttctctgtatagccctggctgtcctggaactcactctgtagaccaggatagccttgaactcagaaatctgcctgcctctgcctcccaagtgctggaactaaaggcatgagccaccatgcccagctaggggtctatttcttactgacttatgcaaatagtaatctgatcacacctttctttattttagtcaaactgattctttttattgttgtcccttgcagcccaagctggtctcacagtcaatagttagccaagggtgaccctaaactactgatccctttgcatctacctcctgagatctaaatcacaggtgtgcaatgccatgcctagttcatgtgctcctaaagatatatttatttattttcaaggcatttttattagatattttcttcatttacatttcaaatgctatccccaaagccccccattattagtggctttgtatatgctaggtgaatcctcaaccacctgaactacatccccatctaatataagatatttttaatattcctacaggttcagctttgtcctgcactactaattgcccatattcttactaaatttaaaatgtagccaacatcaccttactgctgtcctgtttctgtcttctgtccttggtatttatcatctcttctaactccttccttttctctgttgtcccccagtggttccattgtgctcattttcccaagggtttacaatgcatgtttgcagacagttacaatggaagcacattccttcctctttctacccccccccccacttccatgaaggtatttttcccttggaaaatcaatctctctctctctctctctctctctctctctctctctctctatctatctatctctctctcttcccccccccctccatccttcttggagagacacaatctatatctctatagcacattccttcttgtaatagtattttcctatatgtatggttttcaatgctattctagagtttagaatagagtttaaagtaattatttttatatctttagtttcctagaagatgtaacttttccttgccctctccatagaatctcaggcagccttttacagataacattgtgattttaagaaatgaacagaatgagttgatctgagcaatgctgacatatttttccccttaagattgagaagctaaatgtggaatgatattgaaattaaggatagcgtggtgtggttgtttatactgactatttgtcatattgtcaaatttttaaaaatggctttttttttcttttttattgtttttcagggcaatgtcaccttttcctgctcagaaccacaaattgtacctatcacatttgtcaactccaggagcagttatttgctgctacctggcaccccccaaattgatggtctatcagtgagtttccagtttcgaacatggaatgaggatggtctgcttctgtccacagagctgtctgaaggctcaggaaccctgctgctcattctggagggcgggactctgagactcctgattaagaacgtggcaggacatggaactgaaagcctcacaggtacagaatttgttgatttcttctgtaatcaccatcccctctcctctcttcacttctcctctcctctcctctcctctccttgccccattccttcctcttctccccttcccttcctgcttcacttccccattctcttctcctttcctttgtttataaatgttacttcacctaagccaaccatggtcaagtttctccctaaaacataccaaatcatacacagggatgaaggatgggccagtgctagaaaatgtaaattcctgtaaattgaggtgagttaattactttgagttataacatatttcatgttaattattataaaacatgatccatgatcctccttatttggagaacataaatatgagtggtcgcggtgctgtttctcactaattagtaagatgtgtgagcacagatattggtaggccttcagtcacaaatgcagttttactactttaccatgattacaggtcctgctggtcctctgctctaaagaatccaggagctgcttctattattaaaacatgccagtccattaacacacattttccattgataggctggtaggagctgccaggttacccagttataagggagaaaataattttatttcagatatgtttctcaaattctagatcaagaggagagaagttaaatgagtagcgaaactggcaactcttgggtcagaaagctaacctatagtcctttccccaagaggattttcctacacttcagaaaattcaaatctcttaatgtgtctttcaaatggattaaaccatgtgctataaaatttttaccaggaaaggttgagaaggggaaaaaaagccaaaatgagcactgtagattatcctgattttaaatgtctaaaaaacttatttttaaaataattatgatcttgctggctttatgagaggaatgtaatacataaataattggcaattgtctcagtaacctctgtgtgtgtgtgtgtgtgtgtgtgtgtttacttagggtttccattgctgagaaaagacaccgtgaccaaggcaactcttataagcgacaacatttaattgtggctggattaaaggttcagatccatggtaggcagtatagaagcatccaggcagacatggtgctagaggaggagctaggagttatctatctttatctgaaggcactcaagagaagattgtcttcctggctgatagtgggagagtcacttccatactgggtgtagtttccaggtccatgccctaagtgatgtacttcttacaactaggccatacctccttatagttccacttcccatggcccaggcatattcaacccaccacagtgtgtgtgtgtgtgtgtgtgtgtgtgtgtgtgtgtgtgtgtgtaactatgcatgtgtgtttatgtgtacatgtgggttgtacatgtgcatgtctatatattcccaggtcacatgtgcctttacataagtataggggtctgagaggaatataaggcacctgctttatcttcctgctttattcctacaagatatgatctcttactatacttggaactaaggtggcggccaccaagagccaggatcctcttgtttccacctttcatatagttagggttatagactcccatgtggccacaaatggcttttgatgcactgcacattgtttatcaggtcctcatgcttgctcagcctttttatctaatgagccatatcttcagaaagctttaagggccaacaagtttccctgcgatatgtaatgtttcttctaaaactgagtgtgaccctctttattgattgttcagatttcagaaagctacctgtgaccagttcagtgtttctcatattgctatcttagaaggaagttgattcttggggaaaggatagcacagatctatcttctacctttctatatgcaacatttcctgtacaaggacactgcagttccaagatatttggggccttttacactgaaactgcgagaaatgtttgcaaagaaaatacatttctcacttagaaggaatctgagttccattgctctgggtgctgggatttaataaatatcaatacggtaataatatcaagactgctttgatttttttctttgtttcttttcttgaaagactcatagattcgagtactaagaaagaaaagatcctcatttctctatcaaagatttgaagcaggattcattgaatattgtacatggcctgatgctcaggctagacattattataaggatataaacaaatatcatcacgcttcatgataggatcatattaagacttgaacacctagaaaagaaaagacaaaatacaattaagatggtgagctaaaggaaccacgatgtcattcaccctaagaactttcatttagatttcaatatgaaacttttggatgatttctagcaaaatgtggcagagttctggcccatttttccccaactccttgtctaaagggctttaaggattagtgattccagaccatagtgttgatggctcacagtttcttttctgttagtgtgataaaataccccaataaaaacaatgtagggaggaatgcttactttgtctaacagtttcagggtacatgtccttcatggtgaaaaatggaattgcatggtcccatgggatacactgttagaacagttttcttttatatagttcaagatcctaagctgaagaatgatgtcacccacagtgtgaggatcttcctacctaatcaatttaacctatcataggtatacacaaaggttaaccctaccaagaattccctcacagattggcatggaaatttgcctctgaagggatttcagatcccatcaagcttacacttattaccatagagttgctcttcatgaaagaaggcagtgaaatcaaccagagaaaggacacagccatgtttagacttgattttttttttctactttcagttccttaaataacagatgtaaagaagtccttaattgatgtgaaaattcggtggactaactctgatgggataataagaaatgtgctgcttagcatctaaagttgtgtcttttgctccaaaatgtttttctcagtaggctttttctggagagtggtggactttacacaagatggcaggagggtctagttttgtttctttgtttcttttttgttttctttttttgttttttgctttcgattggtttggtctcctttttacagacatctggcctacattaagtgagtttgcttaagagtcataacatatacatattaatatatcatacatttgtgggaattttgtatatgacatgttatgcatcatgtatgtagtgtggacttcatgtggacttcatgggaagacattaagcatcttctattgccctccaccttagttttgtttgtatttttattttttgtttgtttgttttggggggttttggttttattttatttttgatgtagaatatctaatttaacctggagctcctgggttggctacagtatccaatgaaccccagggcccacctgtctccatctctcagtactggtattataggcttgggctgccaagtttatgttttatatgtgttttagaactttgtattcaagtatttatatcttaataacaggcacattacccactgatccatcaacaggccctttttgatgttccatggtgggattattatccatgacaaggactaaggtgacatggcatctacctcaggaagggcaaaccttcttctagagattttgccccttactacacagccctttctatggaagaaacctatacctgtggccataatctaaaactcagaaacaatatagatacataggacagactcaacgcatcacagtccagagtcagtttagctgagttccttttggaactgcaaagtccatttaggtaaatctcatatgtgtaaaagagttatggtattcttgctttctgtatttcttttcttttttatatatgtttttattttttatttttttatttatttattttttgtggcaggcagttaatcatctctacctcaagaaaaatgtcccaggaaagtatcaagagaaagagtcattttgaagcattttggacagttagtaatggatattaaacttaagtggagcagggatctgggatgagctgtagagaagacttcggggtgaaatttaccaaaatgcattacacacacatatacaatcctcaatagataaagtatattatatttagaaaataaagcgagtttaaaattaccagtcacatgccatcaatcactatagacttttctgaagtattatttacttcctggattatgccctcttatcaaacttctcaccaggaaaagtgagcaggagcttcaacaagaacagagagagactgtggtctacttcagggctgcaggcttccaaggcagttggtcttggttgctgcaggctcaggggtcagccttcttgaaactcgacttctgtcagtcttatcagctccttccactgctcccttcacgtggaatgggaacgtggaagtctcattttacaagcttcccagttgagatttatttgggaaaaggacacttgcatgctggttcttcttcccccaactcccatagactgccaggcactgtgaaggccctgggccctgatgtcctgagattttagcacttgttcttcctggaacacttatcattgtcttttatttctttttcttctcttctaccttctcctttcctcctctactctctactgctctattctttctttctcccctatcttctctttcttccctttcctccctctttccccctccattcctttcttctttccttccttcttctctttcatcctatttctcctccccttccctctcctttcttcctccctacctccatctctcctttcttcttggtttgttgtctttcatttgtttttcaagatttctatcaagatcttgtgatatagcccatccactctttaattataaatttttttgcctcattcttctgagtgctggggttatagaatgaatggcaatgttagtctaagattctatcattttaatccttgtgtgtgtgatttcatggtatggtctttgtgtgttcatgtgtgaagcactcaggtatgggtgtaaaatggtgtatatgtggaagtcagagcactattgagtttcagcccacaatgtgacatttttcagacaccatgccagtcaagctagcatataagcttcaaggaattttctcattcccttcaattgtgttacagagtgttagggttactgacagtgctggcacatctgatttatgaggcctctggggctctgaaatcagatcctcacacattgttgtgattttatatattatgccatctcttcaggaccatattctatttttaaggatattttagtagccctcaaagtaatgcttagaatggattatattattgtaaaagtctatattagtactaagaaaacagaatatttcataaaagtaaaataatatccttgcttcatgtcataaacaagattttgaatgtcatataaaacattaagtaatagggaaagaaaaattgttctgctatgctttccttcaaaatggtgggtaattcgtgtgatttttactttttttttatgggaaaacttcaggcaataagaaaagaaagtatgaaaaaggaagtttaaaaaggaacgtgtgaaactccagttttcaaaataacttttattgtagtacttttccctctcctctgaagacagagttaagagctagagagcatgcctttttgtccaggggattagtgaacagagctctgcttggctgaattcctattctgtagacacctatgtcctctgtcactaaaagaaagtatgtcctagatttacagatactttagtcaatcctccatacaagtcctcaaagagaaaaggtcaaccctgccctttggtatttttaaggttggcaaatcaaccattgtcttttgaagatgggccaatttgacttgatgagatatactaggagtaggttgtctttttttttttattaggtatttatttcatttaaatttgcaatgctatcccaaaagtcccccacccacccactcacacttcttggccctggcattcccctgtactgaggcatataaagtttggcacgaccaatgggtctctcttttcactgatggccaattaggccatcttctgatacatatgcagctagagacatgagctccggggggcgggggggactggttagttcatactgttgttccacctatagggttgcagatccctttagctccttgggtactttctctagctccccattgggggccctgtgatccatccaatagctgactgtgagcatccacttctgtgtttgcgaggtcccggcatagtctcacaagagacagctatatctgggtcctttcagcaaaatcttgctagtgtatgcaatggtgtcagtgtttggaagctgattatgggatgtatccctggatatggcagtctctagatggtccatccttttgtttcagctccaaactttgtctctgtaactccttccatgcgtgttttgatcccaattctaagaaggggcaaagtgtccacactttggtcttcgttcttcttgagtttcatgtgctttgcaaattgtatcttatatcttgggtattctaagtttctgggctaatatccatttatcagtgagtaaatatcatgtgagttcttttgtgattgcgttacctcactcagtatgttgccctccaggtccatccatttgcctaggagtttcataaattcattctttataatagctgagtagtcctccattgtgtaaatatagcacattttctgtatctattcctctgttgaggggcatctgggtttttaaggaaatacaaaatctctcatctataagcaaggttgtaacatcttcatagaccctgattagacctctgtcttattttctgtatatatgagataggatcagctccttcaagtccatttattatcacagttcagatattctccatgatttagaagtcacttaccaatataagcatacttacacattcaagcacatacaatatttttgtgtgatttattgtacatacagaaatttggatattgactcaattttcgagtgttgtattaatggtctggttcctacagagagtgttatcaagaagtattagaacttggaagagctaagatttcatgtttctcatataaaacacgctattataaagtgtagaatgaggaaatggatccttgcaaattagataacgtgtttttttttaacagaggtgattgtatttatcagagagggcatatctttacattttgatcatccatagagaattaggagacttatcttaatatgagtatttttctgacaatcttcaaatagttagctttatgcatgtcagaatatatttgtacacagatcaagtgtcagtgatgaagtgcaacttgcgtattgaaatggtctcaggcttgaacataattttagcatgcagaaattaggacagtatgcttaggtctacactagaaaattagcactgtcacattcaacttaagttattcaatcagacactaatgatgacagcaccagatgccaccctgtaatatgctgaccaaaggcctccagatccatggtggcttctaagaaaccttgagactgtatgggcaatgcaggcagaaagtttgctggtgacagttggcactggaattttagctgcttgaatcctccatcaatcaagaagtatttggaggaggcaggatgtggtcctatggatgccaagggaaacaaagaaacattattcatactctgacacacagtcatttttttttaactagaaacaggaggtgtacacagacaaattgttaattaagaccacaaggttataaacaacataacccaaatgaatggatcagactgtaaatacagatatttatatgaaattgctgaggagtggtgtattcaaacgaaacactttgtttgccttatgcgtttgcttctctgattatatcttaaattgtttattggtttgtaatgacactccccatcataaaattttcatataattcatgtatgtatttttataatgtgtaccctattgttctcttttcttccttccagtccaactgctcttgtttttctttccaaatgattctattcccatgttctctttttaagtggaccagtaagtttaatgagaattacatataggaacatgtgtcaggggttatttacaacagcatgagcaacttaccagtgaggacacaactggaaaaacaaaagtctcctcccctcacctgccactgttaactgcctagaatccaattgcagctccatgacagaatattgataggctcaatctagaataggtctggggcaggttgacatggttgttttactattcatctatgagcacatgtgattacctgcatatttttaacttattaaagttagtaaaacattaatttatcagctttaatcttctttgtgtcatttaagtggctacattctaaaatcaaaagatgccttccccctgttcatacagtttataagaggattcatgcaaagcaaataggcggggaaagtgggggatagatgaagacaatggagtaaccagaaagagtataaactaggcaaaaaatgatttgtcagtggtcagtttagtgctctacatggaaatcttagtgtactgatgttatatcataggaatctcatgcagtgatgagaattgggaaataagagacagattgcaacttgtctcaaattaaggaaaaaaaaatggacctgtaactcaagcaagcggtttcattctttggcttcacaatacacctcagggcatgtgcactgaattcattacatgctttctccttgactagatcaaatgagacatgtctgtaattcaagaactgacagtcagaagtaggaagatcatgagagagaggctggcctaggtaacagtacaaacttatctaaaagacaagggctagaatacagcttagtggtgttagactagaattgatttgcaggtactatgtcccaactttgatccacagccacattcaaaattaaaaatatatcttcatgttcttgaagtaactgggtggtttgtaagagaatgagagaatgctaataatgcaagaagtaggacaaagagagtgatgatcatggatccttgctctggcaattagaagaaaagcatcagtggtgctgggaaggacttctcaggtaaagaggaggacctagatatttgaggtcttgacattgatacctagatatagataacaggtgatatcatagatattaggtgagctatcacaactattctacatcggcaagaatgcagaggaggcaaagaaggaagaggaagaggaaaataaagatgaagacaaagagaaagacaaagtgaaagagataagggaccccagagaattcgaggattcccagagagtgctaaccattcatctagcagaatcaagcagtgagcggaagattcagtaatagagcctgtctaaaagattaagcatgatcttatctattttataatctgtttcaggagtttagttttgaggtcctctcctcttcttccctcccctcccctccccttttcttccctcctctcctctcttccccctccttccctcatatacccccacctcctcctttttcttcaagtagaatactctcaagtgttgtcatgtttccttggaaaacagagtcaggctcacagtctctgtctctctctatctccatttctgtttccaatatcccttttatataaatgccaagctgaattctagagcatagaagaagcagagagggaaaagttaagaagttatcttatttcaagtgaatttgtttctttttttgtattagatactttctttatttacatttcaaatgttatctcctttcctgatttctcctctgaaaccccataaccactctcgcctcccatgctcaccaacccactcctgcttcctggccctggcattcccctacactggggcatagagtctttataggaccaggggcctctcctcccactgatgaccaactaggccatcctctgctacttatgaagctggagccatgggtccttccatgtgtactctttggctggtggttaagtccttgtgagctctgcgggtactggttgtttcatattgttgttcctcatatggggttgcaaaccccttcattcagctccttgggtcttttctctagctcttccatttggggaccctgttctcagttaaatggttagctgagtgcatccacttcagtatttgtcaggtactgataagagtctctcaggagctgcatatgtaccaaaagatggcctaggcggccatcactggaaagaggcccattggacatgcaaactttatatgccccagtacagaggaacgctagagccaaaaagtgggagtgggtgggtaggggagtcgggggaggggtatgggggacttttgagatagcattggaaatgtaaatgaggaaaatacctaattaaaaaaaattagaaaaaagaaaaaaagtctcttaggagagagctcctgtcaacaagcacttgttggcattcacaataatgtatgggtgtgaggactgtatatgggatagatccccaggggaatcagtttctgcatggtctttccttcagtctctgtgccacagtttgtctctgcaacatctctcatgggtattttcttccaccttctaagaaggaccaaaataaccacagtttgttcttcctttttcttgagcttcaagtgctctgtgaattgtatcttgggaattctgagcttctggactaatatccacttaccagtgagtgaataccatgtgtgttcttttgtgattgggttaccacactcaggatgaaattttttacttccatccatttgcctaaaaatttcataaattcattgtttttaatagctgagtagcactccattgtgtaaaagtaccacattttctgtatctattcctttgttgaagaacatctgagtttttccagattctaggtattagaaataaggcttctatgaacatagcagagcatgtgtcctaattacatgctggaacatcttctgggtataaacccaggaatggtagtactatgtccaattttctgaggaatcactaaactgacttccagagtggttgtaccaatttgcaatcccaccaacaatggaggacttttcctctttttccacatcttcaccagcatctgctatcccttgagtttttgatcttagccattttgactggtatcatgatgttgaatctcagggttcttttgattttcattttcctgatgactaaggatattgaacgtttcttttttcttttttcctttccttttcttttcttttcttttctcttcttttcttttcttttctttttttttagaatctttcagctttattggagttagttacaggacaataggaaaggacttgttgaccagatcacaagagacttttaggtgcattttagccattcggtattcctcagttgagagttctttatttagctatgtaccccactttttaatagggttatttggttttctctgaagtttaaattcttgagttctttatatatatattggatatgagccctctatcagatatagggttggtaagattatttcctaatctgctggttgcctttttgtcctattgagagtaccctttgccttacagaagttttataattttattaggtcatattttccaattcttgatattagagcataagctattggtgttctgttcaagaaaatttcccctatgcccatgtgctcaagactcttcctcattttcttttctgttagttttagtatatttggttttatgtggaggtccttgttccatttggacttgagctttgtacaatgaaataagaatggaacaacatgcatttttctacatgctaacagccagttgaaccagtaccatttgttgaaaatgctgtccttttttccactggatggttttagctcctttgtcaaagatcaagggaccataggtgtgtgggttcatttctgagtcatcaatggtattccattgatctacttgcctgtcactgcatcaatacctgtagggtttttggttttttttttttttttttttttttcacaattgctctgtagtatagctaaaagtcaggaatagtgagtctaccagtagttcttttactgtttagaatagttctcaatatcctaggtttttttgttaatacatattgatttgcaaattgttctttctaactccatgatgaattgaggtggaattatgaaggggattgcattgaatctgtagatttctttaagcaaggtgaccatttttaccacattaaacctgccaatccatgagcgtggaagatctttccatcttctgagatctttgatttctttcttcagagacttgaagttcttgtcatatatatctgtcacttgcttggttagggtcataccaaggtattttatattatttgtgactattgtgaagggtgttgttttcctaatttctttctcagcctatttatcttcctgtagagaaaggccactgatttctttgagttatttttaaatccagctacttcactgaggttgtttatcaggtttaggaattctctagtggaatttatggggtcacttatatatactatcatatcatctgcaaatagtgatattttggcttcttcttttccaatttatatcactttgacctcattttgttgtctaattgctctgtctaggatttcaactactatattgaataggtagggagagagtaggctactggtttgttgtatattgcttgtactatgtttaggtatgggctttgaattcctgatatttacatgacttttatcatgaaggggtgttggattttgtcaaatgcattctcagaatctaatgaaatgatcatacggttttttttctttgagtttgtttatctagtagattatgttgatgtatttccatatatggaaccatcactgcgttcctgggatgaagcctacttaatcatgatggatgttcattttgttgtgttcttggattcagtttgggaaaattttattgagcatttttacatcaatattcataatggaaattaatctgaagttctctttattcagtgagtctttgtgtgacttaggtatctgtctaattgtgacttcacagaatgaattatacagagttccttctatttttattttgtggaattgttcgaagagtattgctattaggtttttttgaaggcctgatagaactctgcactaaacccatctggtcctggggttttttctgattgggagagtattaatgactgcttctatttctttaggggatatgggactgtttagatcacctatctgatcccgatttaactttgatacctggtaactttctagataattgtccacttcatccagattttccagttttctttagtattatagacttttgtagtgggatctgatgatcttttggattttctcagtttcttttgttatggctcccttttcatttctgattttattaattaggatactgtctctgtgcctctgggtagcctgtttaagggtttatctatcttgttgattttctcaaagaaccagttcctccttttgttgattcttggtatagttctattttacttctactttgtttattttggccatgagattgattatttcctgccctctactcctcttgggtttctttctttctttttgctttagagctttcagatgtgctgttaagttgctagtgtatgctctctgtagtttcttttggaggttatgagttttctttttagcactattattgtgttccacaagtttgggtatgttgtggcttcattttcattaaactctaaaaagtttttaatttctttcttcctgatctatttatcattgcttcctgatctaattatcattgagtagagtattgttcagcttccatgtatttgtgtgttttctattctttatgttgttattgaagaccagtcttagtccatggtgatctgataggatgcatgggattatttcagtctccttatatctgttgaggcctgttttgtgaccaataatatggtgaattttggagaagagaaaatgagttgctgagaagaaggtatattcttttgttttaggataaaatgttctgtagatatctgtttaaatctatttgtttcataccttctgttagtttcactgtgtctctatttactttctgtttccatgatctttccattgctgagagtgaggtgctaaagtctcccactattattgtgtgaggtgaaatgtgtccttttaactttagtaaagtttctcttatcaatgtgagttcccttgtattaggagcatagatattcagaattgagagttgtttttgtttttgtttgtttgtttgttttgtagatttttcctttgatgtgtatgaagtgtccttccttatctcttttgataaatttagcttaaagtcaattttattcaatattacaatggctactccagcttgatttttggatctgcttgcttgagaattgttttcagccttttattctgagatagtatctgtctttgtcactgaggtgggtctcttgtatgcagcaaaatgttgggtcctgtttaattatccattctgttagtccatgtctttttattggggaattgagtctattgatatctgcaatcctataggtggaacaacaatatgaactaaccagtacccgccaccccccccacccccgccccaacctggagctcgtgtctctagctgaatatgaatcagaagatggcctagtcggccatcagtggaaagagaggaccattggtcgtgcaaattttatatgactcaggacaggggaacgccagggccaagaagtgggagtgggtgggtgggggagtgggtggggagcgtgtgggggacttttgggatagcattggaaatgtaaatgaaataaataccaaaaaaataaaaatttctaaatcttattggataacctcctgttgtgttttttttttttaaacatacttacagaatgatttttattacatggagtaaaaatctgagatcaataaaaaaaagattaattttttactttttctagggtgtagtttccctcgttgtgttggagttctcaatttattatcctttgaagggctggatttgtggaaagacattgtgtaaattttttgtcatggaatatcttggtttctcaatctaagttaattgagagttttgctgggtgtagtagactggactggcattttagttctcttagagtctgtatggcatctgcccagtattctggctttcatagtctcttacgagaagtccggtataattcttgtaagtctgcctttatatgttacttggtctacttcccttactgcttttaatattctttcttcgttatgtgcatatggtattttgtttattatttgatgggagaattttttttctggtccaatctatttgatgtttgtaggcttcttgtctgtttatgggcatctgttttttttttttttttttaggttaggcaagttttcttctataattttgttgaagatatttactggccctttaagttaggaaccttttctttcttctatgcctattatccttatgtttggtcttctcattttgtcctgcattttactggatgttttggattatgattttttttgtattttgcatttttgattgttgtgtcaatgttttctttctttttttataatatatttttattacgtattttcctcaattacatttccaaatgttttctatggcaccttcagtgtctgagattcagtcttctatttcatgtattctgttggtgatgcttacatatatgactcttgattgctttcctaggttttttttatctccagggttgtctcccttaggcatttctttattgcatctgcttccattttttagatcccagatggttttgttcaattccttcacctgtttggttgtgttttcctgtaattctttaaggaatatttgtgtttcatttttaagatcttctacctatttatgtgtattctcctgtatttctttaacggaatcatttatgtccttcttaaaatcctctaccagcatcataagatgtgatttttaaatccaaatctttcttttccggtgtgttggtagatccaggacgtgctgtgatgggagaactgggttctgatgatgccaagtatccttggttactgttggtaagaatcttgtgtttgctttcaccagctggttatctctggtgctagatggccttgctgtctcttgctggagcttgtccctcctatgggtttgtaagcccatatcagcagtcctaggagaccagttttctcctggtagaacttgtgtacacagggctgtggaactgcccaagctccaggtgcagatggtgacaggaaggatcctgtcctagctgctctactgttcttgtgccccgtgtgctccttgctagtcctaccctggacagttattgtagagaaaatagctatctcacctttgaacctgggagtgaaagcattcctgggagaccagctctctcctggagggacctgtgcatagcgtgcttttgaacaaccccatctcttgggtgcagattgtgactggaagatcctgtcccagcagggtcactgttcctgcactctgagtgctcctggctggttttgatcccctgaattttttttcttactttcttcattgccagtgatataaaaaatatctactttatactttggaactgaaagttccaattctttgtaggagacaacaaaataatattgtgcaattttttcattctaaatgtgtcacttttgttattattatttattttctttttattaattcgggattgctttttacacttatgagtatagatgccaacctgggccagaagaagatatcagatcaagggaactggaatttcctccagtatgggcttcctgaagttgtgctgtgaactgaactcatgtgctctggaagagtagccagtgctcataactgcccaggcaactctccagactacattttagtaggtaccttgggaaactttggcatttcactctataggatactggcagtgtttgtttggctttgttttttttttttttttttcctaaagtgtattgtaattcctaatatgaacttatcatgtacaatccaaataattcagtgttatttgaaatactaatcagtttgaacctttactattgtaaaaaataaataaatgacctcatgaagtattgacatctcacatgttggctgcataccttattactttagaattagttctttagatacaatccatggaaatgaaatacatttgtaagatatttaatattgtagatataacaccttccaaaaataatgtacacatttatgtttaaaatcaagatatattgtctgttccactctagatcagttgttctatatgctgtggtcctttaataaagtttctcattttggaaaaccccaaccctataattattttgatgactactttataactatatattttttactgttttgaattataatgcaaatatttgttatacaggattcttgatattccacccctgtgaaagcctcattcaactacataggggtagcaacctgtaggttaagaacaactgctctaggacagtgtcttttgccttacagaagcttttaagtttcgtaagattccatttattattgatcttagtttcttatctactagtgttctattcaagaagttgtattataccaatgcatatagcagtcaaacacagaaaaacatgggtaatgatattgaaaagtatcaaggcatagaactcgcatatgaagagataaaggaaggctctggcttctacaggtataccttagcaaactcctgtgatgttatgcaacatcaataaggggagatagtagagcctatgactataataaacttttatgaattttatgtactcctatacaaagcctatgcctagcctaatccttggctcctggatactaaccagactctgcatggtgaatcacatatctcctcctaggattgtccatagcttaccttttgccttacagaagcttttcagtttcgtaagaaaatacattgaaatatagcttcatacattgtgggcatatatttaaattagtaaatgaaagcaaagcacacctacaattgcttatacctcaaatgttcttgcaaaatatatattcattccttggaatcacctgacagaatatttacctcattagcacagcccccatggccaagacccaaattctagcttgtaaaagttttcactaacaggatgatacaacctttagatgattcaaaattgcagagtatgaaatgacctaggccgtttctgtatgaagaaaaaactgctggtgtcattttgaagcattttaacagttttttttttccccagctttttcctttgcagccacccatgactattctaattaatatatagcatttctttatttggcacagatgtccaatattttggtttgcctccctttttttctaagaaaacaaaaactatcagaaatggtttaaggaaagagaataagatgtaaggcagaggagaaatatggccctcatgaaacagcccttcctgtgtctcttgcaggcagaagcttgaatgatggccagtggcattctgtcaacatcaatgcaaggagaaatcgtgttactctcacactggataatgatcctgcttctccagctctggaaaccccctggctacagatatattctggatatagttactactttggaggtaagtttcctgtctttaagagttcacaaaaaaaaggggcaaggaaccgattccaaccaatgctttgtcaactagataacccaccccatagctgggcatgcacacatgcagctgcattcaagcaacaaactgcaagaaagcaaaacctcagacaaccatgcaaatgtaagttatctatggcagaaggaactgcagctattagagttgggttacataacttaccaaaagtgatttgtgttgctaggccaagcttcttggtctcacattggaaaggagacctcagctgaaaacttagaaaaatggggttgagagtcagcaaataaccacaagaggtaaaaactcaagtgggaggcatcaacagtcagccctgccatctaagtcatccacattcatggaggatggagtaaagtggagaagagctagaggctccaaggtacaaggggaggagccattgaaatttctatcatcattctttctattgtttgctgaacccttgcaacatttcaaataacaaaatcaaaaaattactggggtagataaaacttatatggcatattactattttttataaagggacccattttgaggattttaaaaatatcttttattaaaagagatggtgtctacttctgaaaccagtggtctgtcttacagaagtcacatctaactggaacatagtccatgtgcctctctaacctggagctcctaggatacagttcctggactccttttctagaacaagctcacattcaaaattattgggagatataaacaagagcagaatgcaggcttgtggaagcttagtagtgaaggtcttattcagcatgtaataggcactggtcaccatgcatggcacacatgtacacacaaccccatggatattggtctgtctgttcatgtttctcctacacaatgtaaagtatagcacaagctggttcagataatgtacatgtaagcataagctagccttgccctagagataacagttccttcccatgagataactgaatactagcattttattatagcattcactgaagaggtagcagaaacactttcctctcaaaatgaggacctgagttctatccttggagccagtagtgaaagaagagaatgggctccataattctgtcatctgacttccatacacacataaaggcatgcagaatgataaaaataataataacaggaatgaaatacacactatagttacttaaggcctgccacatagtaatcatgcattctacactgatctctattctaaaacttttagtctgttatctccaaatccttcttcctaaggaaatgtttgacaggcttaaaacacgcaaacacacacacacacacgcacacacacacacacacacacacgcgcgcgcgcacacacacacacacacacacacacacactacacacatattatttgctttgcacatgtccagaatatgtatttagggtctctttggaagggagctgtgtgaaacaaaatcagtgaggttggattttagcatgaggaaggagcatagtctttcacccacaattatcattacagactctgtcatagtatatacttatagtggtgatgtgtctatatgatacataataaggctgctatttgatgaaataaaataatgtgtaggttggagatatgactcagtcataaagctcatattgtgcaaacacacagacctagatttggacccctagacctctcagaaagccagactctgtagctcatgactgtaatcttcctgccactcatgccagcaaaccagcaaaatactgtggcaaacagaaaactcatcttcagacaaggtagaaatcagcaactgctgtagttgtcttctaatctccatgtattgactgtggcacatgtgcaactgtacttatatacatcctcactcaaataaaatcaaaataatctgttggtagctgtagaggcagtgagtgtatggagcagatttaatctatatttactgcagtctcatagtgaaaggaaatgaatgggaacagatgctgaacagtggtctcaactccaagctgtgcattctacattacatatggaatttcatcagtgaagaaagaatggtggtcaggaaattattttcaagcaaaatggccttgatgaatcctgtcacaataatcttccgaaacatcacagaaacagctttcctccccctagttagaatattgtcaaattctgggtgggtttttagggtccttgacttagaataaaaacctttatttgtgatatatatgtttgtacaaaccctccatatatagactgtagacattaggaaggtgaaaaatgagcttcagaaataatagtcaacttccaaaaattctttctagagcatcaatttgaagttgtagcatctcttcactttatggtgtgactgtgtgctattaaccagatgttggacctcgaactcctgtctattagagatgtatgagataaatcccctttatttatggcatattgccatgttctcaaattcacattactatatgttctgagcctattaaaaccactgagatggcatttttaagaaaatacatattcatttacctgcttgctcttcacctgtcttaatgaggagaagattggcctggccacaggaggtgctatactggtataatgcatttatatttttaaaagagcattctttaagagctgtggtgttaccctttgcatgtgctattacagtctataattatgtccacttaagcccattattctcttaatgtctgcattattctcttaatgtctggattttctttgcacagcatgtcaaaaacctgcttagttcctgagtataattttcttagaagctagacctgctaatgttccacaattaaccagttactcagctgctatccttacaaagcataatttccttagaaaatatagttcagaattacattgtgaatttagatgtgtttttcagacaggcaacattcccaagcacttaccatatatgaatagtatgtgaaggatgttgttcaaaggaaaaacaaataggtttccaacaggaaggtgtgtgtgtgtgtgtgtgtgtgtgtgtgtgtgtctgtgtgtctgtgtgtgtgtgtgtgtgttgctgactcagttggtacaatacttaccatgaaagtatgggaaactgagattggattccagtactcatataaaatagtgggcatggtgtagaacctcttgagtttcagtgctggcaaggctgagatgagcaggctcctgaggcttattaataacccagcctattccagtaaaaaaagcctcccagtgggtaaggagccagtgtccatcaaagtaaaatgaaggcagagacccagagttaagaaacagccagtctagaaaaattggtgaacccctgattcacaaactaaccttatcttaaagaataaaatgggaattggtacaaaaagacaccctgagtttaatctatggcttctaaatgtatattcatgaaatattgcatcttctacatgcactcacatgaaacacaatattttctatatgtactcacatgagacactgcatcttcttcacttacccagatcttcaggcatgcaatacacacacatagacactcacacatacagagagagaggggggggggggaagcgagagttaaggtaaatgtcataccaataatattccctttggcagtttttttcctttatattgactgagcatccacattttaaataatttttgtacctcctcctgagctaggatttacaacaaaagtattccctgctgtgaataaaaaatgcccaaataattagaccttaaggtcttccatcaataggttgccaaaacaatgacagataatttcagtgctcttcatgttttttctctgtctcacagggtgccctgacaatctcaccgattcccaatgcttaaatcccattaaggctttccaaggctgcatgaggctcatctttattgataaccagcccaaggacctcatttcagttcagcaaggttccctggggaattttagtgatttacacattgatctgtgtagcatcaaagacaggtaattattgtcttgtctcctctgttccctgaccccttcccattctcagttatgaatatgaatttatttaagcaaaattctaatccacagacattagccacattagatataattgagttgcctaatagaaaatatttctaaaaggatttcaggctcagagaaaaacaggttaaattatttgagtctctctctatgttaacttgcagtaaatgagatatgcaaagtaaatcaaactacaaatttgtgaaaggattgaaattttatgcataaacttttgattacattgaagttaaagcacagaggagagagaaattactctccctaaaccatttcatcctttgccagaagtggatgtttttcctttaatatccaaagcttcattaaatctatagctaagggattggctgtgctcaaggtagatatcctcaattggagatggctggtcctagctgacaccaactccacctatttgtttctttagttccaaagcgactcagactagtgataatcagtacttttattttacaactcagagattcaacatgacactcactttctggctagatctctctttggatttgattctgcttatgtttctagattgaatgtcagaaaaccaaagtgaatggatactgaatttcagcagtattttgctatgttccttctatagcacatacctggtttttccctttaactcttaagttcttctacccctcttaagatatcaaggagccagtgggttaaaacgatttaagtgcaaacctatgtgttggtgttagaagtccttggctaaaataattagccattgctataaattgaaatagtcccttatttgtgaaacatgtgttactagtaaggccccatgatgccagtaattagtatcactgttagaatgaggaatgagatggaggagttaacatcttgagggatgagcaaaaatcatggttgactacggtaagaataaacagaagctggtagtgctgcagaatgtctaggaaatagaccatgttttgtgttaccaagtcaaagtactttgactttacatttaaaatctctagcactgggaaacattttataactaattgtacacaatagtattcttagcaatatatgtttccagagaagcaggatgacttgtcttgtaatcctccatgttttagattcagtggacatgctatagttcagctgatttgctatagttcagctcatgggtcattcagggaagacacatgggttccacatagctggtgatgtggaccgagaatcattacaaagaaggcctttgtgctagcagattttggtttcatattctatatgagaattgagaaggaataccatgagatttaactagaaacatgaattaagaaaaatatcaacacatctaggggagttcaagtgatgagtatcccagtctaggaagaaatagtgaaaagcatcaggtaactttactggagaacctgggaaagcagccatgcagaacatggtctctgctaatgctggaaataatgaaaataattagatggaacattagcatacatttctgatactattacacatggaactaccaacacatcactctgtattcttcatccttccccactgccccccacccctttattttccatttggccatgtgtgcttcattaaaatgtgcttatttagaggtctcaaaatcagagcaattacaggaaatggatactaccccaagtagtatgctgtactcctggcaatgaagaaacttccaaaatcatcatctggtgcagcattagagtattacagatcaatattagagtattacagatcaaaagcacatttgtcaattggttatctttgatatcttaatataaaatcaaggaaactctcattatttttgattacatgaaagttattgccatctaccttgcatcattacttttgtgtagttgcagtcttgagtgattacatacatttgtgtttggtttacttgtttaatgagaaatgtgattcctttcatggataactggtatgtttcacttgaattgcagttactttctcttacaaaaaaaggaaacctgtgtccaaagctttcattgctctccttctgatctaattcacacttgtgtgaaatctgggaacctaggtgaaaggttacaaaggcaggtgttccagaagttttgttgttgttgttttgttttgttttccttcagtttttgtaataaaaatagatgtcataatgaaagtgagtatacaagtaaactgttagcagcaatagaagcaaggaagggaaaatgtgtggtatagatgcataaaatgaagaggcaatttgtcagaggtcaggaatggagagaaaagcttcagtgcttggcaagcagacacagggaatctctggagctccctagccaactcagacagggaattccagtttatgggaaactcctgcattgttccatgtttaatgtgttaatcagggtgaatattttggcctgctgctaagaacctacctgctagggacagcaagggttaactctggctgtggtttccctacctatgcactttcctggcaaacaggaccagcagatactaagacctctatccttgctttctatgtgttttttctccttcacagggacatgggaccgatctacacatcctggcttttctttcataatctttcgtccgtttgtttgtttgtttctttctttctttccaaatatgcctgggaggagattcagatactgaaggccatgcagtacattttttaattggttgttttatttatttatattgaaatgctctccccttaccccgtttcccctctgcaaccttcctatcccattcccccttaccctgcttcaatgaaggtgctccccaaccatcccacacattcctgcttcactgccctagcattcctctacactggggcatcaagccttcacaggaccgagggccttctctctcattgatgccatatgagaaccctccagctctttcagtccttcccctaagtcgtccattggggtccctgtgctcacactgcaagcattcacatctatactggtcaggatatggcagagcctctcaggagacagttgtatcaggctcctgtcagcacttcttggcagccccagtagtgtctgggtttggagtccgcatttagaatggatacccaggtggggtagtctctgaatgccctttccttcagtctctgctctactctttgtccccgtatttcctttagacaggagcaattctgggttaaaattttggagatggatggatgaccccattcgtcaacccaggtgccatgcctaaatctctggatctgatattggcaggttatctatcccctttgtggggtatttcagctaacatcatccctttgggtgtcctgtgaggctcttgctttcctggaatctggaaatttctggttgccaccctcagttccccatcccccactgctacacaactctgttcagtttcctgatcctctgtacatcccttccacctccttccatacctgactcttcccctctttttcccctccccaacttttcttcctcccaagtcactcccactgtctacttccctacattactttgtttccccttctaaacaagactgaagcatccactcttttgtcttcctttttcttgagctttatgtggtctgtgagttgtataatgggtattccatgctctttgcctaatatatccttatcagtgagtacataccatgtatgttcttttgtgactgagttatcacactcagtatattatctagatccatccatttgcctgcaaatttcttgatgtcattgcttttaatagcttaatagtattctattgtgtaaatgtaccacattttctgtatccattcctctgttgattctttccagcttctggctagtataaatatgactgctattaacatagtgaagcatatgtccttattacatgttggagcatcttctggatatatgtccaggagtagtatagcttgggtcctcaggtagtactatgtccagtttgttttgatgaactgccagactaatttccagagtggttgtacccacttgcaatcccaacagcaattagaaaggaagtaacaggatggaatgattctctctctctctctctctctctctctctctctctctctctctctctctctggactgagcttttattatttttttaattagatattttcttcatttacatttcaaatgctatcccaaaagtcccccaactcaataagaacgaagaccaaaggaatgattcttttaagacacattcattcccaaaccataaatccattttattaactgtgcatttgttactgtaatacaaatgatcctggcagattttaattatgtgttttggtgtttatatgtgtatgtgcccacatatgagtagatgcacaggtatgagggtggtctggaggccaaaggctcacaacttttgtcattctcagtcattttcccctccgtaatttgagcagggttctctcattgaacctgagcatacttgtttgtctgctgtaaaatgctttcatagcacatgtgaagatcccagaatgcccccagttctatccgaaaaaactaaaactgtaccaaaagcccacctatccctaaaccccatcttataattcacacagctcttttactatttgactgggtatagtttagtgtccagctgtaatcaataattttactctgcattttgggaaagagttcttggtgtcaaatattgcattatgctgggagctgatgctttgccataagtcataatttgagcacttctgacattaatagcatttgctctcgtgattgcagatgaaccagctatgaagcttacataagtaaatattatcctctgttattgaaaatcatatttactgaaagtgaagaataaatttgatatctacctaaaacccttcataccagagttctgagagaagggttgtttgagagtgggaaaataaatgaagtcaaatcattgttccaagctgaagtcctatgtttagcttgagacagttttcagatttctctctcattcattctctctctctctctctctctctctctctctctctctttctctctttctctctccagacaactctctgcttgagatagatttcttttgctcttctaaaatctgtctggatagctaattttctgtagatgaaaaatccattctttcattttacatattaatcagtatttcccccaagttccattttgattattccatgaatcaatatccatgaccccagtctggaaatccaccctagcattaccattctaaccatgccaatgcctaaactagtctgtctcaggctgaccttgtaatcataagcaaacaaatacaaataaacaaacaaacagcacaaaccttatctaggtgagattttgtcttatgatcactacatcctaaattgctttacttctttctttagtatctttctgacaaattggattataatgcagctggttctgttccttttcatctatgaagctccttatacaattcatattgcatccttatattacatagctgagaaattatttatttttgaactcatgttttcagcgtctttcccataattttaagggctttgctgaatgtcacagcattctagcattttgctgagatagagatacatcctcacatctcagacttgtgctgtatcctgttatcatggcgtcattctcctttgctgagagggcattcctccaagaaagaacgtgaaaatatgtacactatgataaaaacaagccttatgcccacagaaaccatcaacacccatggaggccgatgccatgctggcactgttaaaatggcaggaaaccatgtcatacaatctcttatacagccaagccagatatggcacaagtggtgttcagtgttccttattttgtttagcaagatgttcataaaattagaaaagaaagctacaataatgtatctaagcaatataacctgtaaataatacagtgaaagggagaacaggagcacactatccttattatagttttgtgctttaagaaaaaaataaatggagtgtgtctgccatggaaggtgtgtggagagacagcagctaaaagaaagaagatacagacaatgtgtccttagggaagttggaggacatgagtgctctccctgtaatcagaaggtggagagtgctgtaggaatccatgcagctcctggatgccaggttggcagctattaagttggctctgtctgcctggaggaatgatacaagcagtggtcctgagggtgctaacaaatttgtgcccatgtcagctcttattagacagtgaaattactggagaataccaatttctctttggcccagaaaccaagagtagaattggatatacttccccccaccccaccatttttatcaaaagtaactggcaatgactagaaagaaaaaaaaaatcactcaattttatttatttatttttatttatttatttatttatttatttatttatttatttattggctatgttaaactctaccattttctgctctctaaaactgccaaatgtggtctatcatccggtgtgtgtgtgtgtgtgtgtttgtgtgtgtgttcacactcacgtgcaggtatccatgtatgtgtatatatttataggtccaaggtcagtgccaagtttctccctcagttgtttttcttcctttgcctttttgagacaggatctcttattaaaattatttatagattactggtttggctacactatctaactaggaagccccagcgatcttaagacctcttcttcagtcataagattataggttcatgccatcatgtccaacttttccatgatttctgagtagtcaaatccaggtccttatggttgcatagcaaaaacttaactggcaaatccatatccttagtcccttaaatgtcattataaagatgaaaaatagtggcaaaagaataaaagaaatgtgggattactgttctttgaatttttaaaatatctttggttttgtatttcaatctaagtaggaacatttataagtatagtaaaataaaacaataagacagattccatgctagagtctattctctaataattatctggctcaaacctttgggtttttctattggaacataaacgtaaacctttctcatttttcagttaaaggagttgaaattgataggtgtttaatggcttttcaacttacatagaagaaagtattttcattagaaactttgaacttttaaaataatgttttcccttgaaagttaagctatacactgaacaggtctttggatttttggatatagggtagtatctgtgcaaaactaaggtgtgccaggaaaaatgctgatgacaaaggaaggctgagtcacatttaaacatgtctggatgagagagctgagacagtctgactcaataacaggctttaaactgacagttcaggaaactgtttccaagaacttggcaagtccaggcaaggcagttactaggaaaaccccaggcattgggcagcaaatcagaaactgacccaccatcaaaagctactgtgccacctggcctgaggcaaggacaatggttcagcaacagtgtccaggtttttccagcaacaattttcagcctcattcctcattgaccagcaatggttctggaatgtccctagccaaccaattaagataaaggtcacctacctctccctggaatttgcctaatgtgctttaaattggatctgcaaacttacttgggtgtctccattttggtaaatggaagacctccgcatgctggacttctacagaataaaatgctctttgcttttgcatactatttgagttcagggtatcatttcttggtgaatcttggatacttacatgaaaatacttggtcagaggatgtaaacaaaacctatgcttgtaacagatttttgaaataatggttccccattctcaggaaactcatcaaacaggaaattcgaaaaggttcagtttcacacttctgtgtttttatacatctgagggcaaatagatcagaatcgctctcctaatgatttaaatggaaactgttccccacagcagcacatgtttgaacactgggtattctcatatttagaaagctccaatgattctttttttaaaggaggtaaagagtagctgaagaaagtagatcactgggagtggcccatgaattttgatagccaggcctaattcctgttcactttttacctgctatggttaccatgtgtctagctggtctctggtttctgctgtcagtcacttcctacctgcagttatgttttcactgccacgataaaatccatcctcttgagctgtaaccagataaaccttttcttccttatgtagctttcatcaggtgttttatcagcaactgggacagtaatcaatacaaagtacatttaattgatagagttgcagtgtaatgtttgctttaaagacttaagtatgatgaatatagaccacacacatttgaatgttttgtgacaaatgaagtgttctcttttatactgtagtgattacagcaattagtggtgattatgaacttgaattatgattattgaatatagaaactgatttttaaaacatatattctattttaataaatttaaattttgatgacatccaaattggaaactccagaactaaccttaatttgatctcaagtagaattcaaagccttttaaatatttttcaattttataaagatgaggcaaacatattgcctatcatcccaccccccagtaaaatattgggtcccagtaaaatcataattttcagaatcatcttgtgcactgtgaatctcatatgccacaccaatgttttgtgagatttctttgcagagatcataatcctggtgctaggtgctcctctaaatccagtaagggtgaattttaagacttgtgagttgtgagtcttcttggttgatgagtttcaaggtaaagatcatatatagggtctctgtaaaaatttgctcacttcagctgctgctgctgttgttgttgctgctgctgctgggggtagtaggggtggtgagtatgtgtgtatgtgtgcctgtgtgtgtgtatagtccagaggttgacctatgtcttcctctatcactcttacttttctttctaagacagggtttcttactgaatgtgtagtgctttaaataatgtaagttagatggccataaagccagagcaatcctcctttctctatcttctagccacaggatcacagtgggtgatggctcattcagtttattctttgaatgactactggagatcttcatgttagatggtgctcactgaatcatttccttatcctctcacctgggtctttctactagcacaaatgaaagttttccatgccagattataattagtatcctaccaaatacttcaatgctacacataaagtaatcctaaaattttgtctcagtactatctccatattttggaatgtttaaaaattattagaaaatctttttaaaatgtataatctgataaccctgaatcctgaacattcagattaagttcctttggaatgctggttttgtacagtgtcaaacaccttagcaggtctgtgagtcatttagaaattttgagtcagaagataaaacacatttgtctactggacacatcataatattggctcacccaaaagtctttccctaaatagcaataagtcagactcccatttctgccaaatgtaaaccatgatctcaaaaaaatgtctctttgttaaaataagtttgagaaatatcaaagtaacaaaggttaattgatttatttttttctgcaggatctctctctttctttctctctctctccctctctctctctctcttctctctctctctctctctctctctctctctctctctctctcgtgtgtgtgtgtgtgtgtgtgtgtgtgttgtacaagtatatatttcatatgcttataaattgcaagaaatgtaatcattggaaagaatcctacaatttcacaaatacacatgatcactgtaatggttaatattgatttgttttattttcatgtatttttatttcatgtacttcagtgttctgtctgcacatgtgtctatgaaagggtgtcagatcctctggaactggagttacatacaggtgtgagctgctatgtcagtgttaggaatttaaccttgttcttttagcagaagagttggtgttcttaattgatgagccatctctctagccctaatattgatttttaataaggcattatctaaattcatatagtaaacaaacatatgagcatgactatgagggactttatagattgagttaattgaggaatacctgtcttagatgtgagcagcatcagtacacgtcctagaaggaatgaaaaggagaaagaagctgctcagttgcatgcatctctctgcttctagactgcagtcgctgttatgatttcctgacttaacctgttgcccccgtgcaatgctcaattgttacaccaaactgagccaaaacaaaccttcctctcttaaccagatttgtcaagtgctttgtaatgccagtgtttggaaagaagtggctaatacagccatgtagcacttctctagctgaaactggttctcagcatgtttttcttctttagatttttataaatcttcataaataccaggtacctttggaattcacagttgtcacaaaggttacactttgtgcaaggcaattgtggggctatataggtagacactgacatccctgtccccttttctgcaaaaccaattcttctgttctctgctcttttcttacatgtttctctttccagtgttgaagaaattgggattattatatattcatttgggggatcacaattgtatactgggcttctcctctcttaaatccccaagtgtctcttgagttctaatcctcattttttatacatagtgatactgtcttacaaggttgttttattgatctgttagaataattcctgatatagactttactaagtatgaagttgaacacatggcagagacagtggctttgttttacatatgagatagaagaaaacggaatctattttctctacatctgagaacccgtaggaaaccactactagcagtttgttgttgttgttgttgttggtggtggtggtggtggtggtggtggtctttttaaaaaagatttatttatcattatatctaagtacattgtagctgtcttcagatgcaccagaagaggatgtcagatctcattatggatgattgtgagccaccatgtgggtgnnnnnnnnnnnnnnnnnnnnctccagtccctaccagcagtttttacatcaacttcagtcaggtgtctagataatggtaataataaacttgatacagattccagccagtgtttgcactccagggggaaaaaagaggttggtgaatgagatagtcagtagaggaatgaggtattcttcagaaaggacaggtaggatgaggttaccagttgagtttcttagcctcaggggggaaaaacaatttaaaagaaaacgagaggagactactgtcagcaaacaattgttatatgacattccattaaaaacaagggaaaatggaattaatcaacagttaaggactagaatttcttatgcaggttatgaatgttaaatgacatgagacttatacatgagagaatatgattgtagaaaattgtgtcttcttgtgttgaaataggtggctgtgggaagtcttttagaaccttctataatttgtgatgtttatgtgtgtgtgtgtgtgtgtgtgtgtgtgtgttatacattagtatgtgtaggtggttatggttctgaatatatgaacatgtggtcatattttagaggagggtgtcatatgtccttttctatcaatgtccatctttaatctatttccatcaatcacctgagacaatgaatttattgactctagaattaaactggcagccagcaaaccccatttatcctcttttctttgtcccacagagtaccagagttacaggtgcatgtggctatactcagctttatttttaattgggtgctggggattcaaatttaggaaccttcactacattcccagcccaagcatctttacattgttctgtgttaaactagggcattcttcaccattactagttgtgctggatgattttatgtcaacttgtcataggatagagccattttgggagagaaaacatcaatttagaaaatgcccacaccacactgccccataggacattgtcttgattgatgattgatgtgtgttatctataaatcactattgatatggtatagccagtgcgacctgtgagtttgtggtcctccctgggtaatataagatagtaaactgaacaagccatgaatagcaatcccataagtatccctcctgtgtggtctttgtaccagctcctgactcatggtttccttcctatgtgatttctctgccctgactttgatggggtaagaattgtaggctgaaataaactcttttcttcccaagttccttttggtcatgttttttcacagtaatagtcactctaataaagacacggttatagggaaatcttgagtttcctctactatagacaccagtagtggtcttcttcccatgttcccaaaagagaataactcagatattatagggcaataaggcaaacagatgaaagtatagaaaacaaacttcttcgtgataagaaggaacagataggatcagggcaccttccttgccagaggaaaggtgtccgcccagcccaggaagtcattgccagaacatctgtgggagccatcttctttcccggatgctgccaagactagtctgcacaggtgagagtgtggacgacagaagctaacagctactgggacaatccctgtttcaggccttcatcttcagccaggaggcaagtctgaacaacagatatctgtgcaccttctctgcaagaggagagcttgcctgcagagagtgctctaaccactgaaactcaggagagagctagtctcccaggtctgctggtagaggttaacagaaccatgaaaggaacaagctctaataagagacaactataacaactgactccagacattaccagatggcgaaatgcagacataaacttttactaacagaaactaagactgctcaccatcatcagaaccaagcactcccaactcagccagtcctgggtaccccaacacacctgaaaagctagacctggatttaaaggcatatctcatgatgatggtagaagacattaagaaggactttaataactcacttaaagaaatacaggagaacactgctaaagagttacaagtccttaaagaaaaacaagaaagcacatccaaacaggtgatggaaatgaacaaaaccatactaaaaagtgaaatggacacaataaagataacccaaagtgaggcaatgctggagatagaaaccctaggaaagaaatctagaaccatagatgcgagcatcagcaagagaatacaagagatggaagagagaatatcaggtgcaaaagattctatagagaacattggcacaacaatcaaagaaaatgcaaaatgcaaaaagatcctaactcaaaatatccaggaaatccaggacaaaatgagaagacaaaacctacggataataggagtagatgagaatgaagattttcaatttaaagggccacgaaatatcttcaacaaaattatagaagaaaacatcacaaacctaaagaaagagatgcccgtgaatatacaagaagcctacagaactccaaataagctgaaccagaaaagaaattcttccagacaaataataatcagaacaacaaatgcactaaataaagatagaatattaaaagcaggaagggaaaaaggtcaagtaacataaaaaggcaggtctatcagaattacaccagatttttcaccagagactatgaaagccagaagatcctggacagatgttatacagacactaagagaacacaaatgccagcccagtctactatacccagataactttcaattaccatagacggagaaaccaaagtattccatgacaaaaccaaattcacacattatctttctaccaatccagcccttcaaaggataataacagaaaaaaacaaaacaaaacaaaacaaaacaaacaaacaaacaaaaaaaaaaaaaaaacaatacaaggacggaaaccacatcctagaaacagcaagaaagtaattcttcaacaaacctacaaaaaagacagccacaagaacagaataccaaatttaacaacaaaaataataggaagcaacaattacttttccttaacatctcttaatatcaatggactcaactccccaataaaaagacatagactaacagactggctacacaaacaggatccaacattctgctgcttataggaaacccatctcagggaaaaagacagaaactacatcagagtgaaaggcttgaaaaatattttccaagcaaacggtctaaagaagaaagctggagtacccattctaatattgaacaaaatctacttacaacccaaagtcatcaaaaaagacaaggaggggcacgtcatactcatcaaaggtaaaatcttccaagaagaactctcaattctgaatatctatgctacaaatacaagggcagccacattcattaaagaaactttagtaaagcccaaagcacacattgcacctcacacaataatagtgggagacttcaacacaccactttcatcaatggaaagatcatggaaacagaaattaaacaggggcacaagaaactaacagaagttatgaaacaaatgaatctaacagatatctacagaacattttatcctaaaacaaaaggatataccttcttctcagcacctcatggtaccttctccacaactgaccatataattggtcacaaaacaggcctcaacagatacaaaaaatattgaaattgtctcatgcattctatcagatcaccatgtattaaggctgttctttaataacaacataaataatagaaagccaacattcatgtggaaactgaacagcaccttctcaatgataccttggtcaaggaagggataaagaaggaaattaaggactttttaagagtttaatgaaaatgaagccacaacatacccaaagttatgggacacaatgaatgcatttctaataggaaaactcataactctgagtgcctccaaaaagaaactagagagagcacacactagcaacttgacaacatacctaaaagctctagaacaaaaggaagcaaagtcacccaagaggagtagacagcaggaaataatcaaactcaggggtgaaatcaaccaagtggaaacaagaactattcaaagaatcaaccaaaggaggagcaggtcctttaagaatgtcaacaagataaataaacccgtagccagactcacaaaagagcacagggacagcaccttaattaacaaaatcagaaatgaaaagggatacataacaacagatcctgaagaaatccaaaacaccatcagatccttctacaaaatgctatactcaacaaacctggagaacctggatgaaatgatcaaatttctagacagataccaggtaccaaagttaaatcagaatcaggttaatgatctaagcattcctatatcccctaaagaaatagaagcagtcattaatagtctcccaaccaaaaaaaaaaaagcccaggacaagatgggtttagtgcagagttctatcagaccttcaaagaagatctaattccagttctttagaagcagaatgtactctacccaactcattatatgaagccacagttactctgatacctaaaacacagaaagacccaacaaagatagggatatcacctgggcgggattctgacttagaggcatttagtcataatcccacagatggtagctttgccccattggctcctcagccaatcacatacaccaaatgtctgaacctgcgattcctctcgtactgagcaagattaccgtggcaacaacacatcctcagtagggtaaaactaactgtctcatgactgtctaaacccagctcactttccctaatagtgggtgaacaatccaatgcttggagaattctgcttcacaatgataggaagagctgacatcaaaggatcaaaaagcaacatcgctatgaatgtttggcagccacaagccatttatccctgtgggggtatcttcagaacaatttcccttatgaatatcaatgtaaaaatactcaataaaattctcgctaacccaatccaagaacacatcaaaacaattattcatcctgaccaagtaggtttcattccagtgatgcaggaatggtttaatatatggaaatccatcaacctaatccattatacaaacaaactcaaatacaaaaaccacatgatcatcttgttagatgctgagaaagcatttgacaaaatccaaaacccattcatgataaaggtcttggaaagatcagtaattcaaggcccatacctaaacatgagaaaataaatctacaacaaaccagtagccaacatcaaagtaaatggtgagaagctggaagcaatcccactaaaaccagggactagacaaggctgcccactttctcactacctattcaacattgtacttgaagtcctagccagagcaattcgacaacaaaaggagatcaaggggatacaaattggaaagggagaagtcaaaatatcactttttgcagatgatatgatagtatatatgtgaccctaaaaattccaccagagaactcctaaacctgataaacagcttcagtacagtagctggatataaaattaactcaaacaaatcaatggcctttctctacacaaaggataaacaggctgagaaagaaattagggaaacaacacccttctcaatagtcacaaataatataaaatacctagctatgactctaactaaggaagtgaaagatctgcatgacaagaacgtcatgtctctgaagaaagaaattaaagaagatctcagaagatggaaagatctcccatgctcatggattggcaggatcaatatagtaaaaatgggtatcttgcctaaagcaatctacaggttctatgcaatcccgatcaaaattccaactgaattcttcaatgaattggaaagggcaatctgaaaattgatctggaataacaaaaaaccaacgatagaaaaatctcttctcaagcatatcaccttgcctctggtggaatcaccatgcccgacctaaagctgtactacagagcaattgtgataaaaactacatggtactggtatagctacagaaaagtagaccaattgaacagaattaaagacccagaaatgagcccacacacctatggtcacttgatttttgacaagggagcaaaaacgatccagtggaaaaaagacagcattttcaacaaatggtgctggcacaactggcagttatcatgcagaagaatgcgaattgatccattcctatctccttgtactaaggtcaaatctaagtggattaaggaactccacataaaaccagagatactgaaacttatagaggagaaagtggggaaaagccttgaagatatgggcacaggggaaaaattcctgaatagaacagcaatggcttgtgctgtaagttttagaattgacaaatgggacctcataaaattgcaaagcttctgtaaggcaaaagacaccaccaataagacaaaaaggccaccaacagattaggaaaggatctttacctatcccaaatcagataggggactaatatccaatatatataaagaactcaagaaggtggattccagaaaatccagtaaccccattaaaaaatggggctcagagctaaataaagaattctcacctgaggaataccaaatggccaagaagcacctgaaaaatgttcagcattcttaatcatcagggaaatgcaaatcaaatcaaccctgagattccacctcacaccagtcagaatggctaagatcaaaaattcaggtgacagcagattctggcaaggatgtggagaaagaggaacactcctccattgttggtgggattgcaagctagtaacttgtaactactctggaattcagtctggtggttcctcaaaaaattggacatagtactacaggaggatcctgcaatacctctcctgggcatatatctagaagatgatccacccggtaagaaggacacatgctccactatgttcatagcagccttatttataatagccagaagctggaaagaacccagatgcccttcaacagaggaatggatacagaaaatgtggtacatttacacaatggagtactattcagctattaaaaagaatgaatttatgaaattcttaggcaaatggatggacctggagggcatcatcctgagttaggtaactcaatcacaaaataactcacatgatatgtactcactgataagtggatattagcctagaaacttagaaaacccaagatataagatgcaatgtgtgaaacatatgaagctcaggaagaaagaagaccaaggtgtacatactttgccccttcttggaattgggaggaaggcacccatggaaggagctacaaagacagagtttagagcttagaagaaaggatggactatctagagactgccatacctgggatccatcccataatcagcctccaaacgctaacaccatttcatacactagcaagattttgctgaaaggaccctgatatagatgtctcttctgagactatgcccaggcctagcaaacacagaaggggatgctcacaatcagctattggatggatcacagggcccccaatgggaggaagtatccagggagctggggggatctgccatcctatagatggacaacaatatgaactaaccagtaccccccagagctcgtgtctctagctgcatatgtatcagaagatggcctgttaggccatcagtggaaagagaggctcattggtcatgcagaccttatatatcagtacagtggaacaccagggccaagaggtaggagtgggtgtgggagggtgtgggggacttttgggataacattggaaatgtaaatgaaataaatacataatagtaataataataataataataataataataacaacaacaacaacaaagaaggaacagatagtgaggaactgatagtgcacaaagatcctaattctgtcaatcataaggcttgcatttttcctctttctgttgtcctgtcctgatgcatcctcaatactatgtactatcattgaagaggtgcacttttttggcaggtcgtttaactcagagttaaaactcttaatattttgtttacttagtagtagatctgtactatgtgtagaggtttaatgttcattgaagttgaaaagctcactaaagaaaatgggaacatcatgctgtatgtgaggtcctggagaggaattcaggttttacttatatagagtacatcactaccttcttttatatatatacatatacatatatatattctgttgcattaacctacattattttctcctatttggtggacctgagctggcctggctgggattattttgactgatgtttggcctttacatcctgtttgggtgcatgcagctgtgattagtcagtcctttctagagataactccttctccacattagcacaatttctgaacgatttatattaattataaagaatatatggccttgcttttgccagtgtcaactaacccaggcatcatccagaccaaagatataatctttaaggttatctaactcttgatgagtgagaaaatctattttcatgatggatgccttgggcttcagagttctcaagtagaatattcaccactgtggtggtttaaatgagaatgtcctctgtaggttcatgtgtttgaatgcttagttacatttacttacttggatgcttagttaacattttggaaaatattagaaatatgtggtcttattggaggaggtatatcactaggcctgggttttgagatttcaaaactccaagccatccccaataaactctctctgtcttgaagtttttttcttaacatgtaaactttcacctgctggtacaatgcctgtctgctgccctgctccccaacctgatattctttgactcatcttctgaaagtgtaatttccacataactctttcttctataaattgctttacacatggtatcttattatagcaatagaaaagtgaataaaactcacacacaagaccttgaaagcagagaagtgaacagaaaaatgaaaagttctgaaaactatgactctggtgggaagcaagtctcaggcacagcagactttgtgtgtctgtgtgtctgtgtgtgtttgtgtgttggtctttggctgtatgttgtgagtttgtgtttaagtgcatgtgtttgtgtgcatgtgatactgtgtgagtgtgcatgagattttgtgtgtgtgtgtattctgtttttctgtagagagttatttactcaacatttgaataatgtaatgcatctcattattttcctaaaatgacttaatttggggggttgagcattttctagctaagcttattattatgagacattttaggccaaaatattcacactcttaaacactgaagtgtctaaggaaatctaaagcaattctaaaaatttagaatcacatgagagaagatttgcattgttctttatatatacatttgtatgtgtgtgtgtatgtgtgtgtttgtttgtgtgtatgtgtgtgtatgtgtgtgtttgtgtgtgtatgtgtgtttgtgtgtgtttgcatgtgtgtgtgtgataatttacaagtatcaatggatgcttagcatgcccaaggccataagcagagtctgtagtttgtcaaaacctaaaacatccacctttgtttttgctaaaacattcctggataatagatacatatattagttcaaacaatattgagagtctattgtgaggacaaacacaaaatcaggagcccaaagggctatttgctgtctgccactattactgtagttgttagagtcaaagcctaaatcctaatggtcaactagcaagcctgttttagccacctgtcctcaattagccaattagggcaacaagtaatgaaaccatgaagaggtagtgtactcaatttgtccttactgagatggggaggggaggtatagtgaccctccattccccaagactgtcttcaaaattcttacatgaggttcaggtttaaatagagactaagaggaatacatagctgagtactcctcttagttctggcacatcttagctctgctgcagtttgttggtaagcggcctaataagttacaaatctttctagagtaggtaagtccctcccctggccatacctgccacttgagccattctttctcccagaggggaataccttcagaaattccagtttgtttggtttcattgttcctggtagccaaaccaggaacaatgagtcacaatatccttagaatatatttatttttgtcagctccataagtgctgcctgtttggttcagttctctgcctttctttctcaatcctcaataggaaatctgcacaaaaatgaaagagagtgactgctcaggccaggaagctcgatttttttgctcaggtacacaagatatggaaagaatataaatgagtgaggctgaaagtggggcctctcttagcagcccatgtggctagcaacacagagtagaaatattgttgatcttagagcataagatattggtattctgttcagaaaattttcctctgtgtccaagtggttgagactcttccccactttctcttttattaggtttagagtgtctggatttatgtggaaggccttatccacttatacttgagctttgtacaaggagataagaatggatggatttgctacctgttgactaccagttgaaccagccccattttttgaaaatgctgtctgtttttcctagtggctttaacttctttgtcaaacatcaagtaatcatttctgggttttcaattctgttccaaagatctacctgcttatctctgtacaaataccatgcaggttttttgtttgtctgtttgtttgtttgttttattttgtttttatcaggattgctctcttatacagcttgaggtcagttatggtgcatcccccagaatttcttttattgttgagaatagtttttgctatcctggtttttgttgtttttattcaaaatgaatttgagcattgctctctaactctatgaagaactgagttggaattttaatgggggttacattgaatctgtagcttgttttcagaaaaatggccatttttactatattaattcagctaatccatgagcatgggaatctttccatcttctgagatctttgatttctttcttcagagacttgaagttcttgtcatacagacctttcacttgtttggttagagtcacaccataatattttatattatttgtgactattgtaaagggtgtcatttccctatttctttatgtgcctgtttatcctttgagtagaggagggctactgatttgttcgagttaatgtgatatccagtcactttgctgaagttgattatcaggtttaggattctttggtggatttttggggggtcacttacatatattatattatctgcaagtagtgatatttgtacttcttcctttccaatttggatcctttgtcctccttttgttgtctaattgctctgaataggccttcaaggactatattgaataggtaaagagaaagtgagtggccttacctagtgccgaattttaatgggattgcttcaagtttctctccatttagtttgatgttggctcatgatttactgtatattgcttttactatgtttaagtatgggccttgaattcctgatttttccaagacttttcccgtgaagcactgttgaattttgtcaaatgctttatcagcatctaatgaggtgatcatgtgtttttttctttttctttgtatttgtttataaagtggattgcaatgatggatttccatatattgaaccaaccctgcattcctgggataaagcctacttgatcatgatggatgattgttttgatgtattcttgggtttgattttgagaatttgttgattattttttcaagacagagtttcttgtgtagctctggctttcctggaactcactttgtagagcagtctggactcaaactcagaaatctgcctgtctatgcctcccaagtgctgagattaaatatatatgccaccactgcccaactgtgagaaatttattcagtattttttcatcaattttcataaggaaaattgttctgaaattctcattccttcttgggtctttgggtggtttaagtataagcataattatagctaggacaaattgggtagtgttcctctgtttctattttgtggaattgtttgaagagtattgctattagtattgctctttgaaggtatgatagaattttatactatacccatctggtcctgggcattttttttttttttggttggtagactttaaatgactgcttctatattttttaggggtaatgggactgtttagattgtttatctgattctgatttaactttagtacctggtctctgtctagataattgtccatttcatctagattttataattgatttatgttgttatgtctcccttttcatttctgattttgttaattctttttgttctagatcttttagttgtgctgtcaagctgctagtgtattatttttcaggtttttggtggcacttagagctatgaattttcctcttagcactgctttcactgtgtcccatgagttttggtgtgatgtgtcttcattttcattaaattttaaaaagcctttttttttctttattacttccttgacctagttaacattgagtagtgcattgttcagcttccatgtctatgtgtgctttctgtagtttctgttgttattgaagagcagccataatctgcagtgatttgacaggatgcatgttattactttaatcttcttctttctgttgagccatgcttagtgaccagttttgtagtcagttttggagaatggactaaaaattctaagaaggaggtatattgtggttcaaaaaatggggtccctcatccacttggggctagggttgatgggcaaagtgaaagcagtgagtttgattgagcctggcgggcgtaggactgtggaaggctgtgggatcccactccagggttggaaaaaggtgaagtctggggttccctcagacctgcgggagttgggctccaactctcagtcaccacagacctctgagcaccttggaagaacctattctgagatccctgggctacagcgctcccaggaataacaggttcttactctcggagatcccaaacactactgtacatcatgaaagagctgagaacaaagtttggaccctcaggtggactctagcctgggtatactgttggtatgaactccagacagaataccaggagcttggggcactgactatgtgactgatgaccacacgcctctctgcagggggctgtgggggatctgagctgcaaaaggagccaggggcccaggaggcatggccaaactgctatgatcacatgaaggcagaagtcacagcccaccagatctccagtgttccaggcctgtgcttgagtggagaccaggctgcctgtgcacagttcacgaccacacagtatattgttttgttttgggatgaaatgtactttagacatctgttaaaattatttggtttgtaacttctgttagtttcactgtgtctctgtttagtttctgtttccatgatctgtccattactgagagtggtgtgttggagtatcccactattattgtgtgaggtacaatctttgttttgaggtttcctaaaatttctttcatgaatgtgggtcccttgcatttggagcatagatgttcacaactgagagttcatcttgggagattttcttttcattagtataaagtgtcctttcatatgttttttgataacttttcattgaatgttaagtttattcgatattagaatggctactccagcttgattcttcggaccatttttttggaagattgtttttcagccttttactctgaggtactgtctgtctttgtcactgaaatgtgtttcctgtatgcagcaaaatgctgggacctgtttatgtatctagtctcttagtttctgtctttttactggggaattgagtccattgatgttaagagatattaaggaaacatgatagttgcttcctgttatttttgttgttagaggtggaattgtggctatcttcttttgggattgttgaaagaagattactttgttgctttttctagggtgtagtttccctccttgtgttggtgatttccatctattaccttttgttgggctggatttgtggaaagatattgtgtaaatttgtttttgtcttggaatatcttgggttctccatctacattaattgaaattttgctgggtatagtagactggactggtatttgtgtcctcttagggtccatataatatctgcccagaatcttctggctttcatagtctctggtgagaagtctggtgtaaccctgataggtcttcctttatatgttacttgacattatttacttactgcttttaatattctttctttgttttgtgcatcagaaattttgactattatgtgacaggaggaatttcttgtctggtccattctatttggagttctgtaggcttcttgtatgttcatgggaatctattttttcatgttagggaaattttcttttacaattttgttgaagatatttacagatcatttaagttgggaatctttgctctcttctatacctattggctttagggttggtcttctcattgtgtcctggatatcctgaaaattttttgtttgtttggagttttttgcattttggattttctttgactgttgtgtcaatgttttctatggtatcttctgtacccgagattctttcttctatttcttgaattctgttggtgatgcttgcatctatgactcctggtctctttcttaggttttcaatctccaggattgtctccctttgtgatttctttattgtttctatttccattttcagatcccaggtggttttgttcaattctttcacttgtttggttgtgttttcctgtaattctttgagggatttttgtatttcctctttaagagcttctacctgtttacctgtgttctcctctgttttttaagggagttatttatgtcattcttaaagtcctctatcaccatcatgagaagggattttagatccgaatcttgcttttccattgtgatgagctatccaggacttgctgttctgggagaactgggttctgataatggcaagtaaccttggtttctgttgcttatgttcttatgcttgcctcctacaatctgataattatctctagtgctatctgctctcacaacatctgactggatccttcccttcctgttgagtcagaactcctcagagttcacctgtttctatgatcatgtgattctggatcctgtgatccagagagctcctgggagttaaactgcctctgggatcctgagatcctcatgtgaccaagcccctgggatactgggatcctgtggtcctgggcacgttagagttcctgatgtgaatcttcctctgggtgttgtgggactggctatggttttaacatacaaggtctgctcagagcactggcccagacaggaaggaacctgtgctgctgatcaggcagatttcctgggtgtctgggttctgctggtcccagttacttcctgtgttggggcagatattgtgtccttctcacctctgatcctatgatcctgggcctgttagagctcctgggaatgtattttcctctaggtgttgtgggacaggctctgatccttatgtcctgggcgtgttagagtgcctgggagaagagttacttctgtgtgttgtgggattggctgcagaattagcgcccaaggtctgctcagggcacctttgatcctatgatcctgggcatgttagagctgctagattcggtttcttaagaaagagtattcttccaaatatagaattggtctaaaatattgaaaaaaaatggaagtccaatagcatggaccagaaacatatggcagtatctggctcattctgtcctccctagctttttttctgttcatatactgggggattatcatgtaaacaatcattctcttccagttattcctgatgatggtggggttccaatctttctctgtaacttttttaaaatatgttaatattttaaaaatattttatttttactttgatgtattgcatatgcatctgtgtatgggaaactctatccactggaagaaagttagagtttatgaggagcctggtgtgggtactggaatctaagttccctggaagactagaacatgatcataactgctaagctaccttacccctactactatcatgatgcctttgtcttccatttcatctacttatacaaagccagcaaacacaggatagtaatagatactattaaaaagtataggactttaaaactagcaagcaaattactccaatgttaaaataatctgaataatgaaatgtatagggcatctgtggagcccaagggtaaaccaaatcatctaggctttgttgtttgtgtagactatactattttttttttattatgactactttcaagtattagggactgaacctacgtctctgcaaaataatggaaagagtggtaatattgagccaatattttttatccatttttattttgaagctatattctacattcccttttaggtcagcctccctcccatgtagctgaaatacagacttatatcaatggcacattctgatttaatttttctttcattcactaaagccattttattctgtcaaatgaaattctaggcctatctataacagacaagagcaatacctgaagattaaattaagcatttctaaatagaatttataaaatcaaggtctctgtgggtgaggagaggcacatttttttttcttgaattgcttttgctctcctgtttgtattgatgaattctgagaatactgtgacttgcactgttaagtagctttctcttgttaggagttcaatccaccttacttttctgcagatatttttcaataataataagttggaagctttcagaatagatctgatttattctttcatttatagttataatggggtgttttccttatagatacaatatagattagagtgttgtcaaaggtcccattctcaattacatggtatttctctaattttatgttcactctttccctttttcttgcaccattcctatgccttgcaatgatgatgtagcaggaaaatgtttcatgcctaggtttatagggatgagactggagaatatttgtacttttactttctataattgacctgtgggaactcaggcagaatgtgtgacatgacttgtgaatgtgactttgttccacatcccaaatatatgtgacagaatatcccagcaattcacagtaaacataagagaagttgacttgcaagtccaccagagtttcccctaaatataaaatgaccatactgtataaaactcatgcaccacatattttaaaatagagtattttagtttaagttttataaagtgattagaactctttacacaaggacaaaaacaagattaaaaaaaagaataaaatggagtaaagaaacattgtattttctccaaatctgggatataagagcttttctgtcagatagaaatggaattttacaaaccacctcaacttgggttacacaaaaaagccagtgttttagattcattttcttgttactgtgataagatactctgataacaacaactgaggagaaaaggtttattgtaactcaagggcagtctatgtagcaggaggttaagatggctggacacatcacaaccatagtcaagaacagagagaaacaaacacatctgcatacactacccagctacctttctcaactcttagatgacttaagggccaatcccaaggaatagtgtcagctggtttggggctgtgctttcctgcatcaactaacataataaatggcaatttttcatagacatgcccacaagccaaccagaaaaaagataattgaaactcttctctggtggtgttaggttgtattgacaactaaaactgaccatccatgaataggctcttcactgtaaccaaagtttgtaatgttaaacatgaccacaaacatgaagatttttacctttcatctttactggttttctgaagcttttaaatgaaaccggcctagtaaattgaagacctactttttccacacattcccagtgaaagttgttatagtcattgctatgtcaaatacctggggaagcaatgcaaactagaaagggtttgttcagacgcccgacttgattatactatgttgactaggaaggcaggatagaatagtgaagcagctgacggccttgtgtctagtcagcaatcacagagagacgaatgctgatactctgctcactttctcctttttacttagttcaggatccaagaccacagagagtgccacccacactgagtgctgtacataggattttagaagcttttgcatgaaactggagccatcaccacatggtattttttccagaaggcctacgttccattcccagcatccactatgaaggacttgaaaatctttgtaacttgagcttaaatgaatccaaagcacatccactgagcccccatcctcacacacatgcacatacacttgaaggaaaaataaatccttagacacttttataattttgctgtttaacatatttctgaaggatactttcttcttttctctgttcctatttttaatcaccagtgttgtaggttggctctggacacgcctttgatggcaattcaagttaattatggggatccactagaggagcaaaagggaattatgaccgaactttcactgtaaatagagcttagtttatgcagaatttcccagaaaattgcagtttgcaatgggggagaaagaaatgttattagtcatgttgaaatctttgatcctcagctagggaagacttcagacactgaagtctggagccactttccctgccatgtccatatgaatgtacctgcctttttattcttatttttttattgattattttattcatttatttatttccatttcaaatgttgcccccttcccagttttccctccacaaaacccctaccccagcccgttctctcctgcatctatgagggtactccttcacctaccccccaattctacctcactgcacaagcattcccctgtgctggggcatagagcctccacaggaccaagggcctccactgtcattgatgccagatattgcaacccgctgctacatatgcagctggatcataggtaactccatgtatactctttggttggtggtatagttgctgggagctagtagcagggacttggggggggggagttgttttagttcctatggagtttcaatccctttcattttcttcagtctttcccctaactctaccattgggaccccattgctcagtacaatggttggctgtgagtatctgcgtctgtattggtcagactctggcatagattctcaggggacagctataccaaactattgtcagcaagcacttcttgacatcaacaatagtgtctgggttttgtgtctgtagaggagatgtatacctaggtgaggcaatttctggatggcctttccttcagtttctgctccactttttgtccctgcatctcctttagacatgaaatattctgggttaaaacttttgagataggtgggtgttcccttcctttaaccagggattgcacctatccactggatatggtctctacagattctatagcccctttgttgggttttacagcaaatgattcctgggagcctcttgctttcttggcatctgggactttctagtggctgcccccagtatcccaccccccactgctacaaacctaggttcaatttcctgaccctttgtccttctttcccatctcctcacacacctaatcctgccccccttttccctccccatcctcttacactccaaggtccttcccccctctaactcctatgattatattgttcccccatctaagtagggactgaagcattcacactttggtcttccttctttatgagcttcctgtggtctctgagtagcataatgggcattccaagcttttgagctaatatccatttaccagtgagtacataccatgtgtattcttttgtgactgggttgcctttctatcctacctaaaaaaaaaaggttatttctttgctaatactccttctcttgctaacagttttgaaatactggagcgaagcatgctgataagttctgatcctgaatgttctctgctttgaagaagtggctttgaaaaatccttggtagtacaaaccttttagtattcattggaagggaatgctgctcagtggttatcagcttccagtgaagggagtgtacttagactacatttgagctcctccgtgagacacaacattcttactgacagtcctttttagcatcacagatgagcttaaaggctcatttgaccactaccacatgtccatcatttgaggattttcccagaaacaatccaccagggaactggctctctgctgtgaatcagaccctggaaagtataggagactgatttgtgacatggtctctttttattcacttaattctttaatgtcagcatctgctttaatcagaacacgtttcaattatcttgaaaacccaactgtgagagtccaatgagattatgataattagtagactgtagagatagaaatgggtttaaaaacttctgtgaaaaagctgtctgagctaaccaagatcaacacagttggtggttcagtaaagcaacaggtaaatgaaggtaacatagctaatttctaatgtatgagcctcattaaactgcttatattaatcagcttgctttttgatgactattgaaatgtttgttttgaattctctaaggaaagcacatagaaattaaaactgaccttgaactacatggagaagaaatatgaattctaaaaaaggagaacacaaagcatacatacacacagcttaatctatagagtggagcatttctctggaattgagagatgctcactagttaatcctgaaagggaccagagtttgactcccagcatccatgctggacagttaataactgtcacttctgcactgcggatccaacacccacttctagccatctcagttgtctattcttaaatgtatatgctcacagatgtccctgatgaacatctacttgtcttaatttgtgtaagtgcattctacagtacttattctctgcttcaagaatatattcccatcaggatttctatcatgaggcaagacatgacttccaaaccaactgtaaaatacactgagtggtgtaggcatttataaaggttaatctagtctttttagagcttagaaagtaacaaagtgcttgcctaacaggcatgaggtcctagatttaatatggagttgcacaataaaacatcaaaaacctgtttctgatcccatatttaaccatcattaatatataagtattctgtttcttccaggacttatttcctctaaataataacagagaatacaacacaactacacatttactttgcctatttgggtatttgacacatgcatgagagtataagggtgcctgtgcctatatgactgcatgtggaggctacagcaggatatgagtgcctttctctatcactctctgccttattgctttgagacagggtctctcactgaaccagaagttcaatgttacattaagatggccaggcaagctgatataaatggactggcctaaactccctctgtgctggggttacagacaaactcgggcagcttgaattttgacctggtgctagaaattgaactctagtctttgcaaatgatcttggctagtgaaccatttgcacatggcctatttcacttactagcatgttgttcaatgggtgacttcctgtcgcccttacatgcagatgctcctcttcattttagttgcttctgcactccacagtatgggtgtgccaccttttgtacactcccaatggtagactatattattatgttagcttctagttattttaaaattgttatctttgctaattattttatagaatcaattgtatgcatacttaagtatttctagactttttttttcatgaagaagatttacaggttaagacagacacagagtctatgtgttgaaaatatagacatgatgatagcacatcagtaagaggtattaaaggagcaccagcagatgaagtagaaacatattttatagtttcagtcaatatcaggaaatttgttctgataattcacaatttagatgagagctatgtcctaatggcctttgtattgtagggtttttctgctattggcctaaaacaatagatcactggaggcggagcctttagggttatatcttgtccttcactttgctctctggttgtccttaaatgagcttctctgtcacactcactgtgattgacagaaactttgttggacagaaatagaaatttgtagaaatatttaatcccaacccaggggttctatctcaacttagaccatttggataaaacacacacacaccctttttacttgtaataagtcttaaacagtaacaaagctgggcagttgccaatgcagtatgctattggggtccacttacctgttaataacgccaggttattacttataatgttccatcaggtcttcttttaactcctattgggcagatctcagggccacgttctcttaactcctaacccaaagtggcttttcttcttcctcctgtcccttcttctcccttttggtacctctttgaccccaatcactggaaacctaaaccctacctatgtctcttctgcttaactactagctgttggcatacttatttaccaaccagaaataatttagacccaaggtgtaggtacagaatctcttctatgggacaaccaggtcataggggctatacttaacattacaatagataaaaaaaaaaattgaccatcctcaacagaaaatgaaatacatttccttctttaatctagagtattttgtcacagtgtcaaaaagaaaacacatggggcctggtttaaatctgtgcataataagctgtaacagcagacatccagcttgtgattaggtatgattaggatgtaagcatccatgattcactgaaaaatgatatcccagactcaaatagtaggcaaaagtaaagagcattttgtcctacaaaagtagaacatgcagggggtctaccatttaccaagactgagacacccaggtgtgctcctaggtccaatttaaagcagattccgtgaattcctaggacgggtagttgccctttgtctttctttattggtttgctagggttatgggggggggggtcctttgtgattggctaggcctcttgaggatatttaagaagattgctgggggcatggggtggaaagtgaaagctatccctgaggaaacctgggaacttgttgcctcactgctcttgcctcagaccatggtcagagaagcttctaattggctgcccaaggcttgcccagttctgggacacagaaatttaggactagtctcctgaactgctagtctgaagacagtcatagaattagcctattctcattcctcccattccccccttgagtaatgggccattttgaatccttgggatgtttctatggggtagtattgttgtttgagaatcattaattgacttgtgtgaggtggaatctcagggttgttttgattttcatttccctgatgattaaggatgttgaacattttttcatgtgcttctctgccatttggtattcctcgggtaagaaatctttgttcagttctgagccccattttttaatggggttatttgattttatggagtctaccttcttgagttctttatatatattggatattagtcccctgtccgatttgggataggtaaagatcctttcccaatctgttggtggtctttttgtcttattgacggtgtcttttgccttgcggaagctttgcaattttatgaggccccatttatcaattcttgatcttacagcacaagccattgctgttctattcaggaattttccccctgtacccatatcttcaaggctttttcctactttctcctctataagtttcagtgtctctggttttatgtggagtttcttaatccacttagatttgaccttagtacagggagatagtaatggatcaattcgcaatcttctacatgataacagccagttgtgccagcaccatttgttgaaaatgctgtcttttttccactggatggttttagctcccttatcaaagatcaagtgaccataggtgtgtgggttcatctctgggtcttcaattctgttccattggtctacttgtctgtcgctataccagtaccatgcagttttaatcacaattgctctgtagtacagctttaggttgggcatggtgattccactagaggttcttttatccttgagaagagagtttgctatcctaggttttttgttattccagatgaatctgccgattgccctttctaattcgttgaagaattgagttggaattttgatggggattgcattgaatctgtagattgcttttggcaagatagccatttttactatattgatcctgccaatccatgaacatgggagatctttccatcttctgagatcttctttaatttctttcttcagagacatgaagtccttgtcatactttcacttccttagttagagtcacgtctaggtattttatattatttgtggctattgagaagggtgttgtttccctaatttctttctcagcctgtttgtcctttgtgtagagaaaggccattgacttatttgagttaattttatatccagctacttcactgaagctgtttatcaggcttaggagttctctggtggaatttttaaggtcatgtatatatactatcatatcatctgcaaaaagtgatattttgacttcttcctttccaaccagagatccatcccatgatcagcttccaaaggctgacacaattgcaaacactagcaagattttgctgaaaggacccagatatagctgtctcttgtgagactatgccagggcctagcaaacacagaagtagatgctcacagtcagctattgaatggaccacagggcccccaatggaggaactagagaaagcacccaaggaactaaagggaactgcaaccctataggtggaacaacaatatgaactaagcagtaccccagagctcttgtctctagctgcatatgtacctagtcggccatcactgcaaagagaggcccattggacttgcaaactttatatgccccagtacaggggaatgccagggccaaaaagagggagtgggtggttaggggagtgggggtgggtgggtattgggggacttttgggttagcattggaaatgtaaatgagtgaaatacctaataaaaatggaaaaaaaaaagaaaaaaaaaagagaatcattaattgaatagtggaaatctataccttaacaaactaaactataacattgattatgcagggaacacaggtaaaggacaacatcaataggaaaagagaacctgtcagggcagacaagggcgttcaaaaacaaaacaaaacaaaacaaaacaaaaaaaaaaaaaacagttgaggagggactcataataaccctgagactgtccttttcctattcttctgtcttattgtctctttctgactaaggccatggaatctttgaccacctctgagtggtcaacatagaaacagcattctactgcatggtactggtatagtgacagacaagtagaccaatggaatagaattgaagacccagaaatgaacccacatacctatggtcacttgatcttctacaagggagctaaaaccatccagtggaagaaagacagcattttcaacaaatggtgctggcacaactggttgttatcatgtagaagaatgtgaatcgacccattcctctctccttgtactaaggtcaaatctaagatgatcaaggaacttcacataaaaccagagacactgaaatttatagaggagaaagtggggaaaagtcttgaagatatgggcacagggaaaaaattcctgaatagaacagcaatggcttgtgctgtaagatcgaggaggtttgacaaatgggaactgcaaagcttctgcaaggcaaaagacacagtcaataagacaaaaagaccaccaacagattgggaaaggatctttacctatattaaatcagattggggactaatatccaatatatataaaaaactcaagagggtggactccagaaaatcaaataacccccttaaaagatggggctcagagctgaacaaagaattctcacccgaggaataccgaaaggctgagaaacacctgaaaaagtgttcaacatccttaatcatcagagaaatgcaaatcaaaacaaccctgagattccatctcacaccagtcagaatggctaagatcaaaaattcaggtgacagcagatgctggcaaggatatggagaaagaggaacactcctccattgttggtgggattgcaagcttgtacaaccactctggaaatcagtctggcggttcctcagaaaattggacatagtactaccggaggatccagcaatacctctcctgggcatatatccagaagatgtcccaactggtaagaaggacacatgctccactatgttcatagcagccttatttataatagccagaagctggaaagaacccagatgtccctcaacagaggaatggatacaaaaaatgtggtacatttacacaatggagtactactcagctattaaaaagaatgaatttacgaaattcctaggcaaatggttggactggagggcatcatcctgagtgaggtaacccaatcacaaaagaactcaaattaaatgtactcactgataagtggatattaacccagaaacttagtatagcgagatataaggtacaatatgcaaaacatatgaaactgaagaagaacgaagaccaaagtgtggacactttgctccttcttagaattggaaacaatcacccatggaaggagttacagagacaaagtttggagctgagacaaaagaatggtctatctagagactgccatatccagggatccatcccataattaggctccaaacgatgacaccattgcatacactagcaagcctttgttgcaaggaccgtgatatagctgtcccttgtgagactaggccggtgcctagcaaacacaaaagtggatgctcacagtcaactattgaatggatctcagggcccccaagggaggagctagagaaagtatccaaggagctaaagagatctgcaaccctatcggtggaacaacaattatgaactaatcagtaccccagagctcttgactctagctgcatatgtatcaaaacatgacctagtcagccatcactggaaagagatgcccattgttcaggcaaactttatatgccccagtacaggggaatgccagggccaaaaaatgggaatgggtgagtagggaagtgggggagtgggggggggataggggacttttgggatagcattggaaatgtaattgaagaaaatacgtaataaaaaaaatatttttgtaaaaaaaaaaaaaaaaaaaaagaacagcattccacatctaaggctacacagaatcctccttgctagcagaacaagtctaagtctcttctcttctttaaaactacttttgccaaggaggataggaaatcctgtagtaccattatggacttttacatctcctgtacatctagatctacagccaaaagtagggtattgtaatttttatcttgcagtattcgcgctgaagaccctacctgagcagctctgaccagccctaagtcaaagagatattccagtaacacagagaaactggccactctttttacccaattatttggaggtgttatctggctgaagttgtcctctctagagtaaaatttcactctaggtacaagctttattagaactcaagtgtcctcattcatatttacaaccagaacataaatatataggataagccctaaagtacaagcccaccaagcattttctggaggcagcatgtattctgcaacagtaaggtttacaatgtggttgcaaatatgggaataggctgagggtaccttatttccaattcagagtccctgccctgttattgattgtatggccagcttagctctatctggttactgccttctacattgagtactatctatagtctgtaaatactctccagggatagctgttccttcatagtagggagtcttaatattaactcataaccaacagtcctgtgttaagtccaggagggagaagttaagaatctagcaggtggctttgagtaattgcaggggttctgaatttggtgatgaagagggcaatgccagaggtggaacagttttacgaagtgattgattagatgaagtgagacctcactggagcaatagggtgatgggttctgatcaactagcaatggtgggcaaaggtaaagattggagggtggttggtttgtgcttgccaatattttgttgggcctatggggaccatgggtcttggaaggttattttggagcacttggacagtatataggagtgctggatcatagctagagatggaaagtcttagttcccatgtcttaccagcagtctaacttgccttcttgtcagttgctatgaatttgatgacaaggttgttgtattgtcctctggaggtattcagatagtaagggggctcaaaaataagtacacaagtctctcccagaaggttgagtgcccctccaagtgtctgtgtatacataaactgggtcatagtcatgagatcatctttgttgaggggttttcagtttatccacccaatagattcacatccccattccacacagaaaaaggactgtagacctccacatttaattggctccctctgatcctgacaataccctgggtagacttaaaagacccgagacactgtgttcttttgtgtcctgggcaagctgcaaccataacaaagactgtgttgattcaaggggtcccttcactcattcaggaagtcacaaaggtctacatgaatgtaagggaactagttgcccatgggagccaactgggaattagagttggcaatcttactctttgcagcattaactatctgccagatgagattctggggatagtgggggttagtggctagtgcagcaaagcataagcagaaattaagcaggattaggagtgctgaagtcaaagttttagaggattgacggggtattggtgaggtgacattactcttttggtggtttgtcaggaagtctcctccaagaatttccaagaattttcaagatttatgttggtttacatctaagatatcatcctagagtttaggtagcaagagaggaggcctccaagataggatttcagagattgtatgatccaaatataggaggtgttcctagctctatataagtcattaggtaagagggacacccaatctccaccagtttcagaatttaacttgttccaggcctatgtcagggtccaattcatcagatttgtcctgaactctggggtttgtatacataatgtaatttccaattggtcttcaaaacctgtgctagagattgaagtacctgagagattaatgctggtccattgtcagatgcaagcattttaggcaaacctataaggggatgatgtcttccagaaactactttgtcactttgttggcagtctcctttttaagagtaggttattaccctgaagacgcatctataaaaactagcaactacttgtatctatataatcctggttttatttctatataatctatttccaaattaacccctgtccattggctcttaattcttgttcctggagaggcttcttgattgggacctgaggtgttcatgttctggcaggaggaccagtgtgagtatacctaatcaaccaagtttcctaagttaaatattttgtaccttgcaccttgtaacaatttcttcaattttctgtgacccaggtataaatatttacaaatccaatggaagagttgcttagtaaactctttaggtaggatggtgtggccttcaaggctcatcaaccatctttgtcttctggaaattctttgtcatttcatgtgatcttgtttgtctttaggagtatatttaggcccatgtacctgagcaaaaggcatatctgttgtcagtatagaggttagctatggccctgttagccagttttaaagcctgggttagagcatatagttcagcattctgggctaaagttcctggagaaaaaaatcagttgcccaaataacagagttttactccactactgccacccttgcattataattgaaccacttggctccattataaatgaagtagatgaagtagatagatcctgtttatggccagggtatgcatgtccagggtatgccattcaaatcctatattgatagagaaatcatgctgcacatctgaggacaggccaagtagcaggtacctaggtttaggacagatgatatgatgggttatgtcttatgcaaaatcaattcacaagtatagtctgaaagtatatgaaacagtctagaaggttgggattcttgtgaagctatgccagtgcctggaaaatacagaagtaaatgttcacagtcatctattggatggaacacggggcccccaaaggaggagctagggaatatacccagggagctgaaggggtctgcaaccctatagggcaaacaacaatatgaaataaccagtacccacagagctcatgtctctaactgcatatgtagcagaagatggcctagtcgaccatcattgggaggagaggcccttggtcttgcaaagattatatgccctagtaaaggggaatgccagggcaagaagtgggagtgggtgtggaggggagcagggcagtgggagtgtataggggactttcgagatagcatttgaaatgtaaatgaagaaaatatttaataaaaaaatgtttaaaaaataaatttggtggcaaatttaagtgctgttcctcttgacattaacagctgttgttgtgatttaatactactataatccattgcaaatacatttaattaaatgtatacttgtttttaaaattcagtatttctaattcattttcagagtgaagcagaaacttttgtcctagagaaactcacatatacttaatgtctttcactactgtacttttcttcatacccaaatactaatattgtgttatggttatttagattttgatagtaaatatcagatatttttcagatttgttttaaataaaacacttgtatgcataagagatatgttcaacttgttgaacaacaaaagcttgatcctgatgtcatcagggccctggtgaagctcctgccttatcctgttcacagcgtacctacagaaaagagacttagatagctgagaggtatgctgaatgaatcttattctacttaataaacactgatagctagtggtccaacacttagtagaacactagaagtttatttactgttgaatataaaaaaaatcttatgtgcctctttaatgacagtaatactgtgtatagctttaacacacttcagattcaacagcttctttatatgatatgtaatcacttatacagtcagaaagcagtccagtggtgttgtttttaatattagtgttaatggcaaggaaaaaaatcctacatcaactcagataaaacacatagaaaagctctgccaactgaaaggaacatttaggaatatgccagaggctgccttttggtcagtgtattttaagggtttcacaaaattaatgaagcacatgtgaaaataaaacccaaatctgcctttttagttttagacactatattgaattaattgtgacttattattcttatataatacatgaataagtatattttactatgcatagaattttatttgttcctatttaagccattttatattgttatacacctctttgtaccaagatatctttttatgtgtatgaatggatgttcatgtacacatatatgtgtgtaggaggtgggtatgtgaatctgtgtataaaggccacaggaaaaagttggatatcattccattttgagacagtccctgtaattgagacctgtgactggaagattaggctggtgtactggctgtttttgtgtgtcaacacaagctggaattataatagagaaaggagcctccattgaggaaatgcctccatgaaatccactgcaaggcatttttttcaattagtgattaaggggcacgggcccattgtgagtgttgtcatctctgggctggtagtcaccggttctataagaaaacaaccagagtaagccaggggaagcaatccagaaagcagtatctctccatagcctctgcatcagctgctatccccaggttgctaccttgtgtgtgttccagtcctgacttcctttggtaatgaaaaccaacatagaagtgtaagctgaataaacacttactcccctacttgcttcctgaccattatgttttgtgcatgaatagaaatcctcactaagacagctagggtgcctagacagcaagccactgttacctacatgtccctatctccccagtatcgaaagtaccagtgtttatcaacatgccccaaatatttttgctgttttcatggtattgggaatttgaacacagatccacagtttgcatgacagtttaccaactgaactattgccctggtttctaaaatgtctttaaggtaacaaatctgacagcttcatttactatcagtattatcttactagtctctctgaatcttctctcatttctccctggcagtgttactttagtacgtacacatggagctcagtttgaagatgattctctggcacagatataggaagaaatctagtacacataccagtcatgtgaatgtcagtctcaagcaagatagctttcaggcctgactgttgattcaccctcactaagtggttatacttttcacctatagactggaaaatactattacagctacatctcatttattattgtgaacagatgtcaagattttttttttttttagaatttgttgacaaaataaacctcttagcaagcaaatatccagtttctgataactgtgagaaatatttggagaaattcagatcaaaaataatgtttggttaaaatcaataaatatgttgagtatttggtttaaaatgatgagatttaaagtaagataagtgagtaggaagttgaattttacaacacaattgacattgtaaaaatataaatatatatatttataaaattgatttggagcttaattaatatttgaataaaggcttcagaatgtgaattgaaaaagaaagggcactcagaagaaaatcaaacacacccaagaacatgggaatggtctcatcataaacaaatggtataatgtgagacacacataagtgtagatagatcctcctaggaaagtcatggaaataaatcagtattggtagaaattttccctaaagaagtattaatttccctcacacacaaatattctgcttctttggtgcaattatttaaaagtacttaggtgatgaggttgtcggagctcaaaagtcaatttcaattgccagagtagtcaaagtaggttttctttaaatgcatccctaaccatcagcacggaggagcagtttgtggggtcatcttaatttctctattcaagtaattccctgataccatcttttgttttcgtgcatgaatgtgtgtatggagtatgtgaacatgtatgtcataatctgtagcaccattaatacacatgtagaagtcaaagaatgatattgtatatcccattctacccttcaccatattttattcttttgaactgggatttgcacagagcccagaactgacctggcagccagaaagctttgtggtcctcctgacacttgcctttaaagggctagagttgcagataaatacatgcctatgtttggctttttagatggatgttaagcattcaagtttagatcctcaggcttgcatggtaagccactaagccatcaccctggcacccatgctgtcccctttcactctgattcctttttaacatgagaagaggactcttcagtagtataagttcctgtcaccctgatattctgcccaaagtagtcactcaatagcagaccaaattttctgaaagcatgagcactataagtctttcttcctttaagttcatctgatatattagtcatagttgtcttactatagcttatatactttgcttccttatattaccatctcttcactgttcaatctcccatagatatcatagtgcatgacccaggagcattctggtgtgtagaaacaaaagctggctacactgtgtcttgctaacaaggcctagctaatccttgttactcttacctgcaaaatatattaattaacccccatatgaactcattgtacttatcatgcagtaacaacagctattctaaatgggatgtggctaagctggcagtttgctggcttagcatttatgaagccctattcttccatttctagttccacataactgacctgatggcagagccaactgaagtttgaaatcattcaaggctatataactatttcaaggacagctcagcctgggatacataagatattgtctaaaaaaaaattcagtgaactggaagaaaatttattgaatggagagggagaagagcagaaaggagaggaaataaaagataggaaagaaatgaaagaaaagaaaaggaagagtagtgactaaagggatgggtcagcagttaagaattcatatggcctctcctggagcccatatgaagcagcacttaactccctgtagcaattagcatcaagggatccaacaccctattctagcttcctccacaagaaactacactcatttatgcatacccatatatggacacacacacacataattaaagataaaaacaaattattaaataagtagcaaatactaaagacaaaatgggacagttaaagaggattggagtcagtcagtggaaacaagttataattgtgtgatgtaaaacgtagactagttgggactcaacaaaaatttacctatgtctgactcccaaacacaggaattaaagacatgggagtactctcagatctgccttatttttcaaggaagagtatctcactgaaccctagtagctttctcagttgcccagcaaacactagaggtctttttgttcccatgtttctagctgtaagatataggccagggatgttatgtccagttttttatattgagtccaggatattggggcatatgaggctatatatatatatatatatatatatatatatatatatatatatatatatatatgttttgttgttgctttatgagcacaggtgtttaggcattaatgacatttccagttgtcacagaacttgattaacccatttttcacaatccaatggcttctttgtttaactttataaaatcatgacactgggaacaatatggatctatgttgctggtaagctagtgagtgccaggaggctgcttgtctttaccacctagaggtaagattacagacacatatgaccatgtcttgactttttatatagtttctcggacctaacctcaggatctcatacttgcttaatcagtgacagacctatctccctggcaccagttttcaagtgttaggatactttctgagttatcatattttttctttttatgcttattgattttcttccccttccatatccaatgctttctttgaaatcttgatcatctactgaaactcttgtgcactctgatttcatacagagtaaatatggcagtgtgtctgccatattcatcaagtcagacactaactgtgttacctcatctgggctttgaatcatccagaaaattgatatatttaaattgaaaaagtatgcattaagaagtcacatttgtcaagaacatttacaacaattggcagagggggatgttgcacatgatgtctgtgtgttctccatttatcatgagtgcatatggaggtcagaggttgacaaagcacatcttgctttacaatttccaccttgtagatagagtcagagtttctcatttgactctaaagtgagtgtgttttgttttctagctaatcagcttgccttggagacttcctttctctgcttcctgggtataaaagtcacaagtgttctgtcttgcttgcctggaatattgcatgtgtgctagggatacaaactctatcccttatacttatgcagccagtgctttaccactgaaccatcttttccatcctaccatgactgttttagatatattattttggttgtgactaccaatatccacatacaatgttagttcccttttatatctatatgacatttactttctgtgtttggttctaaaataatcagtttgtgctacttgatagagcaaagaaaagaaacagcatttaacaggaactgattaaagcatctggaaaccatgctcatgaatcagtcttttcacttgatcttagccaaaaggcttaaaagcagtgaaacagcctcttcaaataagcaaattataagacttacctataagtctcctatcaagtaagtgtgttgagatgatcttttctagtctcagtacactggtcctaaatacacagtgctataagaaagctctgcatgttctcactcagtttgttccttattctagaattattagacttttccatttctcaaatgttcttttcattgtgagaaatacaacagtgattcttttagtgaccatagacaaatgactttgagccctatattttcaatgttaggttgagtttattaacactagtgcaaggactatgggaaacttattaaaaatgtttttaaatgactagtatttctgacagcttacaccaaacctttttctccatatacagctggacttgagaatgttgtcctaaaatcattataatttgtgtagcataagaaaaaaatgttattttagggtgtttttatattgatagaactgtatagtatgtatgttttcatgttgatgtttgtacaaatgcatgtgtgtggacctctggatgtagatgccagaggatatccttagctgttgttcttcaggaatcatccattttagttttgaaacaggttctctcataggtcaggaactcaacaagtaggctagactagatagccaatgagtataagggatttgactgtccctaactccttaactctgtctggcattagcagcatgcaaaatcatgtacacagattctgtgggattgagctcaggccctcatatttgtaagacaagcatttttctaattaaactatttttccagtagctatgagtcgtagttctcatagcagtgtatgtattttatcttctgctgttccacttcttctttatgagatgttcctgatagcataggctaggatttaaagaaaaaaatggagactatcccttgaggtggggtcactagccatgaccttatctacagaaaaaccagcgctttactttataaatcacttacaaaatcacaaaatagtattaagatagataaaaactttcccaacaataaaatttcatatggatatatgtgtgtcatcagaagttggctttagtatatggtaaagaaagccttaaataaaaaaaaattaaaatagtttaaatttacaccttaaagattcaccaaaaaatcaggtagcagaggttaaataataactgaccataaaaatttattaacctgctcttggaaatatgccactagacttggatgatttttgtgctttactgtgccaaatgtcaatgatgatattgcttcatgaaacacatcttctaagagttgtaatacttgtttctttatatataaaaacctttgtttgagagctgcaaaatacactcagattcaaactggctctgtgtttgtttcagtttgtcaccaatgaatccttactgatctagcctttgaggaccctcgtcccagggacccccatatccgactggcgtggtctgtggcaagtgtttgttccgatgtaaagttataaccattctgcattttgtgccacaataaatatttagctattctctagaatattcctacctccattcttgtatctgtgcaaaagaatttaaggttttacttaaaggtgtaattcaattctgagttctctacgactcagcatgtctgaatggttttcaaatcatttaactgtggcagtaataggactttagcatatccatttcctgttgctcctgtttttgcttgcctgtctgtttcaaccatcttggcttgattgctttgcatttcctcccattaggtgtttccccaactactgtgaacatggaggacactgtactcaaacctggacaaacttctactgcaactgcagtaatactggttacacaggagccacctgtcatgattgtgagtacacaaaatgtgcctacagtatgtagatacaactccaggaatgcagtgtggggaccctggctactcaccacattgtgagcactgtctatacctttagcataaattatcaaataggatacaatattccaaatactgaatggtgcagaggaaaagaatagacacaagccatatctttatgaaatttatgagaacagggtaaacaaagtgaggtcagatatatggtaaattaaaagagaaaaatgatgctataattacacaggggagctttgcaagatggcaatgtcttcattacttgagttgtactgttgcaacaagtagctcatatatcaatggtccaagtgacaagtggcttgatgtctgtcttagttattttcctaccacaatgataaaatactatgaccaaagcaacttaagagagaaaagatttatttgggtttacagttccagaaagatactagctattctaaaggaagaaggcatggcaaccagtggggaaggcatggtagaaagaacagaaatcctgacatcactttgtattcacactcaggaaacagactatactagaaaatcgaataaagctctatagcttccagtcctgtccccagttaccaatttattccaatgaggttacaccatctaaaagttctgaaattttccaaacagcaccacaagccagagaccaaatgttcaaacatgaacttatggaagacagttcacattcaaactacaacatagctataccacaaagtccctcacacattttcaggccttctttctcattatcttaataaatggtagcggtatcttctgaatattgctatggccaagagaaggaaaatacaggaaggaaatacatgataagggtacaggcttgtattttattcaaaggcttctactgaaaatatgaatgagtaatatttctgctcacatttgcctgatcagatactaccctactgtcttcttcaatagaaggaataatatgtcagaccatgagaagagaggctaaaaatcttaaatattgattgtaagtattcgtgactacatgtcagtggtgggcatttggaaaattttagattgaaggcctaggctgattgtgttcaagatatagaagaaaaatagaaagaagaattcagagtatggaggaagtgtatatactagtgagtataacattgtcctgtggagaaactgtaaagaacccatgcgctagaatggagcactaatgacagagtcaggagacaagagaacaggactgggctggtatatgtgaaaggagaaatatccattttcttgtggttggcataatttcatccttgtttagggttgaaaataatttttttcatgtgtatgactacatttttttatctattcctcttctggcagtgccctgggaaggttccatgacgtagctactgtgaaatgagctaaagcaatactgatgtgcaagtgtttatgggatactgacttggagttctttcgatagccttccatcccccggggtgatttggctaatatatcttgttggtctagtattcagttttccaggcattttttttttttcatttgtgagtcctagattgtattagatgaattaagtcatatatacagaagacatgaagttagaagtgaatctgtgtgggaaagaggtgtaatgatgggaggcataatgagatttggagcagaatgatcaaagatatatggcatggtccacaagatgtggactctttttgtgctatgtatatgggtgtgtatatatgtatgcatatgtcctaatttgtactggtatgtatagaggatagaagctgaattcagttgtcagttttatctttgcttagttgtttttttttttttttctgagatgcagcttctcccctatcctggagctcactgtttctgatgagctggtgagcaaggccccaggatagtcactacctatcacctagctctgagactgcaggtgcaaaacactcttacttaccttttacataagttctaaggacaaatttagactctcatgcttatgcacagcaaattccaacttagcaatcttctcatcatcatgagttgcattatttacaggattagtcctcagaaatggcagaaggtcaagaaacaaattgatttgaaaggtcttacttcatacttctaagtgtctgaaagacttaagacagtgtatacttcacagttcttttctctgactttattttcacttttctgttggaatcacttaatagataaaactacttaccatgtctttctgctaaatgcttggatatcaaaatggaagttaatatttgtactcttggagttagtatttttcatttgctttgtttaaattgtttaaatttgactgctaggaccatagaatgactgttcttcatttactgacaaactgccttgtatatctgataattaatattttgattccctgaaacaaagaaggatttttactgaattatattctgactacactcaggaacagctccagttgactttatatcttagaccagacaaagtcagtgcatgcctagctcatccccagctgcatgaacaaactcacttctctatatttttctttgtttcatcctgcttttctccaagctctttaaaaatccacctatttatccatcaattgacatccattaatataagaggtgatactgtccccagaaaaaaagtaatttggagatcaattcagagaagttgtcaccctgatgatcacctcttatattaaatactatttatcctgaatttgtcccctgggacacatatctggaaagcatcaggaaagtgattcctgtaagttgttctctagtctatgatgatttacacacacacacacacacacacacacacaaatacatacacatgcacatgcacagtcatgtaggaacagcaccctaagccctcccacatgcagataaggcagctccaagctctcagaccaagctaatggcaagtacctgctgccagaccctgacccatccccaaactgtatataagaatcctatccagaaggaataaaggtgtgtgagaactactttgttatctgagagctcctctcatcagagctgtaacactgccacttgggaagaggtctgctgttccgaaaggccaccaaaagttcctccacactcctcccctgctagtcagcttctcattgactcagcccagtcagactcagcattaagtaaccccacctattgtgcccctctagttttcctgcatatcagtgtgctttcaatcaggtgagctgctgctcactctgctcacagttctatcatatacaaattgattacttctgttttggtgcttaggctaagttcttggaacttctttgtgttgccagaagaccaagctccaagcaatttaccctttgtatgttatttcttctttcagagtcagaaaacagatgccctctgtaaatttcaggctagcctggtatacagagcaacttccaggacagccagggctacacagataaactctgtcttcaaaactctattaattaatgaattaatgaatgtgttatatttatttacctgtttacttacttggtgtgtgtatgtctctgtgtatgcaagcacatacatgagtgcatgtgtatgtatttgtgagtgtgtgtgagtgtgtgcatgcatgtgtgtgtgcatgtgtgtatgtgtgagagagagagagacagagagagagagagagagagagagagagagagagagagagagagtgtaaatcatcatagactagagaacaacttacaggaatcactttcctgatactttccagatatgtgtcccaggggacaaatttcccagtcatcatgcttgaccaaccaagcattactagtagtcaatatatcctgctgattctctcttcttactcttttccttctcctcttcaaatctcttctgaaacctccattattgttttcccaggaacagagctctcatcccagcaactgaacctgatgctgtctgcagtatcacaatctcacttgtgtttttcagcacctatcaaagatcaaatatctactatgtaatggacattagatcagtgctgggggagatagagagatgggttacttagtaaatagctttcagtacaggcataagaacctgaattcgatgttcagcactctgtaaaaattaagggtgatatgtgatgttatgacaggatcacttgggcttacaggcttgttagtctagataaatcagtgagataagagagatatgtctcaaaaatatgaaaaaaaactataatagacagcaatgttgagtccctatacatgcacacctaccaacaagatacacacacatatatacacaggcatatacacattctctctctctctctctctctctctctctctctctctctctctctctctcatcacatattggaatacattggaatacatacatgctcatgcacagacacagatacacatacatacacatgaacaaacttcttctcttctgcttctttcttcttttcttattgtcccttcatctttctctcctcttcatcattccctttcttgtccctcttcttcctttctttctcctctttcctcttctatttcttccccctcatctttctttcatattgtcctttctttctccgtttctttctcttttttctcttccttcttgtctatatgaagttgagagctatctcttattaacatggaatttaaagaacgttaatctcaataagaacctcatcttataatattaatatatgagttaagcctatgataaagatatgaaagatagtttgtaatatattttttgtcagagttacttactatgtgcaattgtctaaatgtgacagagacctgtttccataaagaggaactagcaaagctactctgctgtgtgatgactgttaactgtgaagaccagacagcttgatatgttcctagtcaatatatgcttattgactatccaaagcaagaaatactccatcagacttgagagaataaagctgacacccttttgtaaagctgaaaagggacctgaggtgctttgttaggatgtcagcaagctacactgtgaagagactaaaggcgcttgagacatggggcatggtgcagagatcctaaacatatacctgcaggtgtcatcagacagatattaaaaagatcaaggacagctatttcataggaagcagacagaagctgggacacaactatcctgtccctttgcaagtcagcacaaaaactaaacacatgacaaagagcagtggtttaatttctgtccacttctattctttgcctgtgacaccatcctctgcagagtccttttttgaaacagaaagaagtgctctccagaaaaaaaaatgactaatacacatgtaagatctatttccatgttaaattctattgattacatataaagaatcaccttcatcaaacatcataagaatttttcatgaaattaatgattggcatgccaatatccccacatcctatggctattggaacagcattgctgcataaattgcccaatgtaaatgaaggattggcatagtagcattagtgggagaacctcagacatagctgagatcacagctggcacccatgatctcacataacttgctgaacttttgtgctctatcattcatcctgaatattcattaggctatgaattgatttttactaagaaagcctgtgttaaatctctctagaaacatggctcagaatgagtataatgattcagtgtactgtgtcacaatcacattgtgtaattctcttttatatttgtattagtttctctctctgtctctctatctctctgtctctgtctctctctgtctctgtctctctctgtctctctctctgtctctctctctgtctctctgtctctctctgtctctctctgtctctctctgtctctgtctctctctctctctctctctctctctctctctctctctctctctgtgtgtgtgtgtatgtgtgtgcacatgaggccatctgtacatatgtgtctggctgtacactccggaagaggatgtctggtgttctgttctgttactctcccccttatttccttgtgacagagtctcttgctgaacatgcatctagaatgacaatcagagatcctcttgtcactgcccaaaagctgatgccatcagtgcattggtgatatgcctgtctttttatttgggtgctggggacctaaatgcaagtccacatgtttacacaggaagcactgctactaagtgagccatccccaggcctgagttcacagcttttaaactatattttgatgtccgttcctagaacaatatctatatgactcacatagcccatcccttgtaaatggttcagaaaaccctaaggattccctcacattctttgctgtttgctttaaaaggcaaaattgcccccccaaaaggctgtttttctaagagttatgagtatccaaagttcccttctattctattacccttgaagcagttcacagatgtgaaccatgagtgcttttaacaagagaaaggaaaatcagagttctaaggagtaaaaatatgtgctatttctaatcaatattttatgaactttattttaaactatgacttactccattggttaaattgtcaagtaaataattttgagtctgttcaatttgaaagatataaagtttttaacagtgtagttcagacaaaaggttcagaaagttttctccacatgttgaagttctctaataccacatctctgtgacctgtatcaagttattccactaattgtaggcttgctgatgtcacattcaagggaaaaataatataatctgcccctacagctactgagataaattcctgagtcagtgggcgtgaaatctcccagacaagtatgataatagcccttccttgtggtttctgctgcatttgcatcatcttgtctaccctgcaaccttgagaagaaacaaagcaagtgttctttttcatacaaagcaaagaataagatgaagaacagtttaggatggaaagtcaaggacattctactacaatatcaagtaggacaaaagcctgacaattttggctccttctaaaaaagaggttaggtccattgcatcctagaagagattcattgtttttgataaagtacctatgtgtgcatggctgtgtgtgtgtgtgtgtgtgtgtgtgtgtgtgtgtgtgtgtgttcatgtgtgtatgtatgtgtgtgtgtactgatgaggcaacaggttgagtttgggtgattttctccactcctctctacctttcttttttgggagaacaggatctcacactgaactttgagttcactttttcatgtaggcttgatggccaacaagtccctatctccacaccctcctcacatgtattttattcacacataattgagcatggctgttcgcagcttttaattggttctagagatctgaaccaaggtaatcttgccccaggagtaattcttaattatattcctgttgtgtccttaaagctatcgtgattatacccctagattatttcagattgtttagtgattcttcattaactttgatttctatgtatgtgtgtgtgtatgtacatatatatgtaggtgagaacatctattttgaggtaggagacctaaggtcccattacttagaatctctcgatcttctttgtgacagaaaatggtcaatacattggtttaactgggcaggaactttaagtgctccacatgtcttgcttcccaattactaggactttcaagggcaacaaccaggcacacctttttgtgtgtgggctctgggcaccaaaatcagaccattatgcttcaccaaataactcagcttcctattccttcttccttatcttaacacatataagctctgtggtcagtttctgggagtagagaatttcaagccctgacttctgtgatcttctttagagcagctctgagccacttgtcttcacttgttcatagtaagaacttctccctcttcctgtctgttggctttatttcaacttggccacttcctgccagatctaactttgtgtttttcaggtaatttgttatttaattcaacattcttctcttagactacatgtacacctggttgccataagtaaattcttcgtctttttcttggtctttggcgtcagaagcattggctttaattgtgtttcctaaaactagtactaggtttagaaatctgtttgtggaaaaaacaaaaacaaaaatactgagaaagtagagtggtaaactttcttgttggcatttctttctgaaagctctaccctgatggaactaaagacaatatcacataacccatgtttttctttccatcatcacttatggagaaatttctcacttttaagtagtgaaaggactgaggctctagcttttctttcaatgaatatttcttaaatcttttgacattaagtcccatgaattctcaaagggccttgtaaaccatccttcagttgatatagctgtaggtgaatccaattttaagagacctagtataaataggacatgtaaaaaactaaatatgtgcagacaacataaaaaagaaagaacagtatccattgctgtagcaggacatgaaactgagtttattatactgtcagttgagtggctgtcaaagtcagtttgcagcagtgaagatttcctgctggcatctaatgcaatgattgagaccctggcaattattcccttgctcctgactcagtgatacctctgtcattatggctggaagaggaaatgagtattttctttctgctaacaattgaattcattacagcctgttgttttaatgaggcatccagggaaaaataactatgcaacatattcaagggatgcctgagctcaggagccatcagacaaagtacccatgcttcttggtgtctactacacaggtagtttcttaatggcatcattaggggatattcaaatgatgtaaaacatactggcaggggtaatgacttcaagggaaagactgagagtgctggccataaaactatgagggtctgaattcatatctgcaaatcctacatgggaagcaaaaaactgccataggcacctctaaccccagtgctggagaaggaggaggaggagaagggagaagagaaggaggagaaggaggaggaggaggaggaggaggaggaggaggaggaggaggaggaggatnnnnnnnnnnnnnnnnnnnngaggaggaggaggaggaggaggatttcagaaatagaggactattgctgattcttattgcccagctctcccaggtataaaatggtgagctcttagtttattagagtaattggggtccattgatgccaatatgtggggtgaaagggagatacagaatatcctcctctggcctctgcacacacattgtacacacagttatgcgcgcgcgcgcgtgcacacacacacacacacacacacacacggtaacatgaacacaaacacatacagagagacacaggagcatacctgtttccttttggtttttatttaaaatgtagcacgaaaattgaagggtatttaaaaactaaggtgtcttgtttcacttctaaactctaataataacctaataaattgcacgaagtcattttacattgagccaggtgtttctgtctcctctaaatatgacagtaacaacaaccatgattcttttataatgagacatagtagatcataattttcacttttatttttggaaattttattattatttatttctagatttgttttaggtatatttaggtgtgtttgtatgtgtctatgtgtggatatgtgcgtgtgaatgcaagtgccatcagatgccaagagactcctgcaaattcttgtatgagacactgagatttgaggcagggcttgctacacactaagcaggtgttatcacagtgaacaatagctctattctgaatttatataaatcatctcatcttccccttctttcctccatttctgctcttctgtggtgtagtaaatgctgacttctgggtctgaggaaagtctgaatttttgattccttgtatatctcttcatgctgtatcccgagcttatccccgtcccgcgggaaataaacacaggacacaccagattcttccacggttaacttttacttctatatcatattgaggtagacaaagaaagctcagaaagtgtgtggcttaaatacttttggtgacgtgtctaaactaggactggtagcaacacccatgatcctcatgcaccctggggataggttaaagcccccaggggttgggcaaaagcctcggagatggactggtgactttggctggctgtgctctcgcagctgcgcacaaagaggtttagcactatctagtggcggcacgtagattgcagccctttacaatgctggtctcaaaactgtctgcaatgtcccagctacaaccttcatgtttctactgatagcaggaggagctgttgctgttggcaggtgcaatttctcccctactttctttagttatatttgagttactaacagttcttttttacagagaacctgaccttgaaaatccccttacacagttcccacttgtcatcaaaaggagactatcatttttaaaattggagatttattttcaaattatctatctgtgtctgtgtacatacatgtaaggggaggtatcttcaaaggccagaggaatatgttatacttgtcacagatcatgttacagacatttgtaagacaaccatcatgggcagtgagaactgaactctgaccctgtgcaagaagagagcagtctcttaatttctgagctgctgctctagatttcactgtttcccacaacccttacctgttggtctctggcaggcggtctctggagagttatgaacttgttggatatagaaagtgctttgcgcacgcctttaatcctagcacttgggaggcagaggcaggcagatatctgatttagaggccagcctggtctacagagtgagttccaggacaaccggggctacacagagaaaccctgtcttgaaaaaaaaaaaaaaacaataacaaaaaacaaaacaaaaacccaaacaaacaaaaagaaatatttaacagaaaggggaatttctgctgattattaattagtacagagtatgctttgaatcaaaatgtgataatcactatagcagactttcaaatcactaatcatagttatatatatatatgtatatatatatatgtatatatatatatatatatatatatatatatattcatagttgattctatattttatcttgtctgagattacagtaacattcttttgtcatttttatttcattcacctcatgatcctgcaaatttttcctctcaaacttactcatctgtgcaaaacacgtttatatcagttaggtacaaataagtgtttacactggaccaaatcatagattaaatattgtctatagcattaaaacactttaagacttgatttcgaaggcaaatggcttcagaatagcaaactctgaagggcagtattataatacacactgaaaaatatataagactgggtatggataaatcaagctgaagaaaacatgtagcctattcagcaaagagcaagagtgagattaaaaaaaaaggtacatgttcacctgtgatcttcacagtcagagaagataagaaggtaaggaagtttcaagaaaccagaggatctgaactaggatgggagtgggcaggtaagagaagggctggccagaatcatctggagttattactgaagaagatgaaggatgatagacatcactgatatcagtcagattgcaggaaaagaaaaagctcagtgaaagatgtactagaagatttagtgtgataaactgatttaagtaattgtgggaattaattggcaagtctgaaatccaaagggcatggagttgggaaagaaggctgaatgtccaagacaggaggttaagctattttcctccagtgaatgtgttcatgtgtgttcatttgacttcgtttgagttcatttgagttcattgtgtgtgtgtatgcatgaaagggtgaattgggtgtgtgcatgcctgtggcatgtgtgcaagtgtgttattttctttgcatgcatgtttgcctatgtgtgtgactgtatgtacatatgtgtatttctgtataaatgtgtgtggatccacatgtgagtatgtgtgtttgaatgtgtttgtgcatgtgtgttcatatgtgtgtatgtgcatgagtatgaatgtttgcatctcagggaggcagaggaaaatcttttgtgttgttttctcagaactgtccatatatatattttattaagatagcaccctccccaggctgaaattgctaatcagcttaggctggctctccaatgagcctctcactatatctgcctcttcaggactagcattacaaactcttgtcaccacattcagcatttggggtgtgttctggaaatagaacttcatgcttctagacagtttactgcctgagccctctctgagctcctaggcaatatttctttcaaggaagactcagctccatgtcatgcttttctgatgatttcagacttcccacccagattttccacataacctccgttaaatattgtcagctgctcatagattttaatctcatctacaaaacccttttacagcagcactgagatcagtgattcactaggtgactgggtgcagtattcttgccaagctaatacatgaaactcaccctcacagtcatatattaccttggccccattgtcattctccgcttcaaatatattcagttatacttctgaaaatgtggcatcctgcagcataagagttttgactgtattatttacaaccatgtcacataagcttgtctagccctgtgatattgacactggttatagtgtcatgtagcatatgattaagatggaagtatactaattcttatgtaaacaaattatagctcactctcttatccttgatttaaaatgtatgtagtgaggtcaggggaggtggcagagttgattgatgcacaagcaggagactgagttttatcttccaaactcctatacaaaggcagacataatagcatgtgcttagaatcatagcactggacaagcagatttttggagctcacaaaccagacaccctaactcaaccagtgagtctcaggcaagttaggagaccttgcctcaagtcacaagttagactgtggccaaaaatgacacctgatgtggacttttggtttacacacacacacacacacacacacacacacacacacacacttcatcaatgaggaaaagtggctcctgggtttgtctattatcttgttcaaatgccagggtctttcttatgctatacacattcttatgattcttttatggcataaaacctatgtgcaacatgtgaatttagtggcaccatatctagtttgtatatttactgtcctccagaggtccatgtcttaaagattgagcccaaagtagcaccattagcaagtgaatccttagaatttgggctgcttaagactgagggacaacttctgctgtctttttgtctgctggtgtgttcatatgaatgccttggcatacctctgagatgaactgttctgacataggcataatgggaatgggtttttagcttcatggaccaaaactattagactatatacaccttctatctttgcaaattaactatgtcaagtgtttccattatagtgacataaaactggcacaagatgagaacttcattcaacccttataaaacattatttcacacaggattccctttaaatgaggttacctgtaagcaagaaatcctgcccacttcttggtgagtcccttggcactagactgatgtctaggtgtgggaagccacatgtgctgttgcagagtggtgctggctactgctggccaccatgcataagtttggacaaacaaccaatgtgtacatatgcagtaaagttttttgccaagacactgcctggcccggacatgataatgaggttctgagagtaccaccaatcagatgtgagacgtgcaaatgaggtatgataatgaggttctgggagtataaccaatcagatgtgagacatgcaaatgagttatgataatgaggttctgtgaggtactgagagagagtaaccaatcagatgaggaacatgcaaatgaggtatagtgcataaccaatccgggtgtgagacatgcctctctaggcctatataagcagcaccaattctgggcttggggtctctttgcctctgtaatcaagctctcccaataaacgtgtgcagaaggattctgttgcagcatcttacttgctggtcgagtccagcgcgcaagatctaggttttcagcagagtcacacatctcaggctagggaagaaaaggatgactcagtttcttacgtagtaccaggaaaaacttatatctggtctttttgtggatatggtggggaatatatgccccagtgtacagatctctattcttgtttcaggccctgatctccaaacacagtttctaacctatcccagagttctcatgtggctgaagggactttgtccaacttgaagataatgagcatggctctggaaaaccttacccttttctgtctacctggataaaaactggttagattacaatcctgaagctagcccccaagggctatttcctccttctgagggtgactaccaaagtctagctatcaatgtactaatagccatcaatgaaaaacctcctttggctcatatagttaacatgcccaattaaaatgaaacacctcatctgtacatggggtttctttcccttgtacctttataaactgtcactttcctatgtaccacatctctcttctctctattcagaagtccattgtctgacccctcccttccctgaataaattctcagtatccctttcctttacccattttctctactctcctttgttctctttccctcctccatcttctatctcctgtctttgtctcttattccgtggcttctgtcctttggggtatgtaaatctcctttgggctccacacttggttttgggggtcttgagccaagacttttccaaataatggcaaacagtctcagggatatcaaagaagagttatccaggccatgctttctgtagtgtaattctcgtacagaaataattcagtatatatgaattctacagaataattaatttctacacatattaaaaacaacatttaattacatttttataaagttttataaatagtacacatgtgttcatccatataattgagccctcagcttgtttgtgtttttgtttgttttgttttcctaaatggctgttcaaaagaatgtttggaattcattaacttattttgaaaaatatcttgtattttcaagtctgtgattaacccacccaagtagctagcaggaattatacacatttcccagtccccatactgttttcaatgtaaatattataatttggaggaatcacaaatgaaagcagatgataagtcatgagaaccccacccccttctagccctgtcttctgtctacatttacagtcagttactatcaggtagcctttatccttatagagacacgaacagacacacagtatgcatcacacatatgttttatattttttattttaccatttagcaatctgtcttatctaaaccacagcttttcttacttggccacacatacattattcacttatcacttatcaagtgctggaaaatttgtattttagttcacttttagaaatcctaattggtgtccttttcagaaagatattattttggagtcaaaattaatacacttgaacattaggatatattgtcttaggattttactgctataaagagataccataactaaggcaacccttatgaaagaaaacattcaactgggtctggcttacaggtttagttacaggatcagagattcagtgcattatattatcaaggcaggaacatgacagtctccagacagatgtgggtctgaaggagttgagagttcttgatcttcatccaaagccagacagaaatagaatggcttccaggcttctaggatgaaggtcttaaggcccacaccaacagtatcacacttcctccaacaaggccatacctactccaacaatgcaatccctccaaatagtgctactccctgcacaaaatgtagttaaaacaccacacatcacttcacagacttcaaattatttcagtatgttaagaatttccagaaaactgcttggtgggtgaagggtttaatgtgactttgtgacatactggaaatttatgttctatagtcttgaagccagtttcactcctagtaacaataccttgctcacagacttgcaaagtaacttgtcatcgttggaattttggccaacttgaactatttcttgaaaaaacagaaataatttaagggagatcgttagcatgtgattttagagctctttggaagaagacatctacccagtttctactatgctggatgcatggtcatggtgctaggaggagtagagtctgtctgtctgtctgtctctctacccctctttctctttctctcttatctctcctttgttttatgtgtttgtgggtatatattcgtgtttgtctccctttcatatttctatatctatatataaaacctaaacttatatatattgtggacaagtgaatacagttatgatttatattgtagatccatgtacaacagggtaatcttctgttgctctgttttccagccacatttactgctgaggaggattgtgagcctacatgggaagcagtttgttataaattagtgaaagaagaaatatatatgtcaaaatatgggcataagtctctttatatatatattaggtattttcctcatttacatttccaatgctatcccaaaagtcccccataccctccccccactcccctacccacccactcccactttttggccctggcgttcacctgtactggggcatataaagtttgcatgtccaatgggcctctctttccagtgatggctgactaggccatcttttgatacatatgcagctagagtcaagagctccggggtactggttatttcataatgttattccacctatagggttgcagatccctttagctccttgggtaatttctctagctcctccattgggggccctgtgatccatccaatagctgactgtgagcatttgcttgacagtatagccacatattggttgacaccattggactagcagcaggtagcaaaagcttgtctgaaaaatgtcttttgacaaatgttcatttgatttcagtgggattccatatgtataaggccttaggagccataacctgttacattgcctatccaaatggtataaagtcaagacatgcaatgttttatcatcatgatatgatgttttcatttaaaaatacattggaccagttcataaattaactgggatgcatgctgtcagaaggcttggttgtgtttaggtcacaaaattttgcagcatttactgtacctaatactgtcagaaactaacaaaatggtaggtattttatatcaaaatattgaacatcttttaaaaataaagcaggatgggctcttgtgatattcttgaagtaaagatgattgctatgtaagaaagacgaccatggaaggaagggcatagcagactgtaatttcagtcttagaaggtagaaattgaggattgcaggttctagctgggtataagactaactgtatctgtataatctggtttaaattgatgttctaccacaaaaactaaaatcagagagtggttgaattttttaagctgcattatacttttatttacctattgtcatgtgcgtaatatatggttgtctgacacattgtacagtatgcaatagtgtgtgtgtgtgtgtgtgtgtgtgtgttgtagtcttatagaaggcactgaatatttcagaagaatataggtatagggtatccaaaatgagaagatgaatatctacatagtacgtgaatgtttgctaaactagaaggaatgcagcagacaagtttatgcatccagaggacatgcctggatcttcagagatttatttagttttacttgcatataagctgatgattgacatttactgtcaactaaatagaattttgatcaagctttgtctctttcagaatgtttagactgggataatgaggtgtaaggacccagtgagacccacctgaatgtacatcataggtggtccaggatagaatagcaaagtagcaagtgagctgagcctcagcactcatctatctctctctgcttcctgactgcaagcaaaaagtaagcagatgcctaatgctccatgttccatgacttccttaccacaatgaactctatcctctcaatgtgagcccactcgtcctctcatgttctaaattgcttatgtcctgtactgtgtcacagaaatgtgaccagtacctcactgggaccatggtgccattttggatttgtcttggtgtattctccattttttttcttctttcctatccccccatttcctgttgtacacttccactctctccccacaacatctatcctattgtcatgtcacagatgcccctttgccctcttctattccacttcctcactatctcttttctccctcatatggtctgttcttgggttctaaacaagtacacacaagcccatacactctccacaccccaaacacacaaacatacatatatatgtatatatgtgtatatatatatatatatatatatatatatatatatatgtatatatatatatatatatatatatatatatatatatatatatccagtaatatatatatatgaacatcagtaataaattcttctgatatatatcttacatcatacatcatacatcattcgatgtatgtacaatgtacggtgtatgatgttatataccatatattgtatatcatttattgtatattatatcatatattatattatatattatattgtatatcgtaaattgtatatcgtatatcatacattgtatatatcatatatcatatatcatataccatatatcatatattatatattatttattatatattatttattatattatataattatacacacacatatatataaacgtatatatatatatatatgtatatgtatatgtatatgtatatgtatatgtatatgtatattaggatattaggacttgttgggaagcagccgaggccttgaagagcctgggttaactatgcagcctgtggtaattatttgcctggggaggcaaaggcagcttggatattagtcactagcaatgtaggacagtcaagtactcaatatgttttctcattttcttagaattctctgaaacatattgattttcttttttctcattagcaaatatcattttagatatttaaattataaatggaaatcatggtaacatgggagtaacagcaaaggaaaaaaacaaaaatggaaaacttggtataatgcctttgtaagattcacaaatcctgtcttttgtcctgcttaaaaacaattaaatcctttaattagaagataaggagtaaacaagaacacagattctcctatgtgattcctcaactaagaaattaaagctctttaattttctgttttctagcatggcaacataaaacaatctcactaaaagctctatagagcataggtaaaggctaggcagagtacatggagcaatgactaaggaagtatgcttatatgtagaggaaatgcctggatttttagaagcttagagtaaacagaaagtggatgcacataagaagtggtcaactgagccacattctcaagcccagagtacaacaggtgcagagacaaactacatcccataatgtagtataataagaaaataagagagctatgcgggatgatatcccaaatattgatatggactaatttgttatttcagctcatggctactgcagtacctgaggatgtcgtccctacaattgagagtcattttataggaccttcatggagatcagattacaaccttggatgatattctatagacgttattcaccattttatttatttgtttgtttattgagataaattctttcactgggctggaactctccaagtagtgagggtgtcctgaaggttcgcgttcattagcttcatagtaaaatcccctccatcagtgaggctgcaccattgtaggcattagagttatttgagtaatggattaataatcagtttatttgctgaggaggtaatgtgcttgatctgtgaacatcaggaccttagttcagattccagacttgatgtgaaaaactgttcttagtggaatgtgcttgtaatgtttgtgctatgagatggagacttccaggtggatccctgggacttcttattgtccacataggcaggcttgctaggccagacaatttattatcatagaaactgacagacagtggttacacatgcctttaatctcagcacttgggagacagaggcaggcgaatttctgagttcgaggccagcccggtctacagagtaagttccaggacagccagggctacacagagaaacactgtctcaaaataaaataaaataaaataaaataaaataaaataaaataaaataaaggaggagcaggccacatgagaaacaatatcttcggttgaccacatcattgtgcaggaaggatgacacggttttaaatttagaatttagtatggacataaatatgctgtagaatagcattgaggcatgctcataatagaaatttttatcttccctaaaagtttggtgagggcacatttgttaaaaacttatgtaaaatattataggaattgctgaggtaaaaacacacatttttcactggaaagtgtcttctttgcagattaaaacctaagaatttattaattcatactggaagacaattacattatggtatataaatgcataatatatccttaatgctcaatttttagctcatgtgtagaagacttgagattcactaacaatgatgacatggactaatcttgtgtaaataggatgccctctgagaacttctcagaaattgctcatgtttctctgtcatgttcaggtccattttgaaacttatgagcatggtataattacattatatgtgtgtgtgtgtgtgtgtgtgtgtgtgtgtgtgtgtgttacttccagcatttagaggacagaacatggaatttgcagattctcaaatacgattaataccagctaaacagcttagaacaaaccttttgcattactttagcgaacttgcaatattcatgaataggcttgttagctattcaggtagctgctccctgtttagtgtctgagcaatggaactaaagtctaaggccaagtgatttgaggagagtgggctgcggagctaagcagtagtttattacatgaaaatccctgttttgtttcaccttgtttcatttttatacgaagaatggttaggaaaaaaaccatggaatcctttcttggatagattatattacaacataagtgagtagggataacaattttttagtcttagaatgattcaagcttgcaaattaggctcacagctcacagggatcatactgctccaggaaggtctatagagactttcatcttttatcttatgacttcataccatcttccctgtacatcataaagaacctctagttcgtcaacagaggagtaacacattgaaagtctcaggttgagaatttgaaagatcatgtctagattggagcatgtgtcccagaccatttctgcttgaaatgctggtcttctcttagtaacccacacatgttatgctttcttaacggtgttcttttgtgttgtagttatccttaattttcagtttgacacagcctatagtgaagagagtaataagaaggagttacctaaattgcattgccctttggaaatatctgtgggagaaaggttaaattaattgtggtggtaagacacagtccagcctggatagcacctttcctacacaaagatttctgaactatttgaagtaaagaaataaagctgtggaaaaatccagcaatcaagctgcatattttcatctactcctttctgactttactagttgtggccagatgcttcaagcttttgctccagtgaattctgacatgatagagtgtaccttggaattatatgccaataaactcctttgtcccccaagttgcttttagttagtgtattttatcagaatgaaagatactagaatatcttgtgtagtttcagagtggttttttcaccctgcacacttacattcttttcaacctcagctccaatgagtactttctgtaaactcagctcttatttttgttagttgctattttttctgcattacctgaccacacagcatattatattacatggtattatatgtctatttgtttgagaatataaagcctggcttctcatttttaaggtcattaccattaggctgtaactctctctctctctctctctctctctctctctatatatatatatatatatatacacacatatcacacacacacacacatatacatatatacacatacacatatacacacatatatgtatacacacatgcatatatacacatacatacatatatatagtgttacaatagctggaattaggtatagttgaacttggaacctatattggtacttttaaatttacttggagtcacctgactggcatgatgccttcatcatttactgtgaggaacgaatcatcagcaccagggctctgatgtactgtagccctggagcccaaaacaccttctgcttccttttctgtggtctgatatcacaacttgccattttgccacgtcttttgacctctttttgtgccctctgacatcaaaagctctgcctctgaagagctttatttgtcattagttttagcgctattatttttctttctttttttatttttattagatattttcttcatttacatttcaaatgctatccccaaagccccctatacctttccctcaccctgctccccaacgcaccccctcctgcttcctggcctggcatgcccctgtactaaggcatatgatcttcgcagaccaagggcctctcctcctattgggggctgactaggccatcctctgctacatatgcaactagagacacagctctgggaggtactggttagtctatattgttgttcctcctatagtgttgcagactcctttagctcctttggaactttctctagctccatcattaggagccctgtgttccatctaatagatgactttgagcatctacttctgtatttgccaggcactggcatagcctcatatgagagagatatatcagggtcctgtcagcaaaatctttttggcatatgcaatagtgtctgggtttggtagttgtatattggatggatccctggatggggcagtcgctggatggtccttccttctgtatcagctctgaaatttgtctctgtaactcctcccataggaattttgttcccccttctaagaaggagcgaagtatccacactttggtctttcttcatcttgagtttcatgtggtttgcaaattgtatcttgagtattcactgataagcagatagtagcccagaaacttagaatacccaagatacaattttcaaagcactatttttcttttctttgttgacacagggccaagtcaaattctcaaaaatctagttcactgggggtttaaaaagcttaattaaataaatggctgctaaataaaatgcttaacaagcatttacttagttctcagaattaagagaaatcatgtttatttatgtctatgggcagtgtgtgtcaatttgtaatttgtaatcacatagtaaatcctctattacccatgacaccagaggaagaagaaacatagcgctaaagcactttttaaaattacttcatttattttttgagatcataattacataatttatcttgtccctctccttcctccaaacctttccatatatctttttttgctgcctttcaaatttatgacctcttttgaaattaatttttgttatacacatacttctttaagtatatagagcaatgtacagataatgatagacacgctaggaacaactgtaacattttgaagatcttaaaaatatgcactgagaagcaagtgacaaggcttactgagtaaagaagcttgccatgttaacacgagcaactgagttctaatttctggcacctacaaccaagagtcaggcatagtagcacgcaattgtaatgccagagcttgcaaggcagaggcaggctcatctgcaagacctcctggccagtcagtttagccaaactggtgagcttcaggttctgtctcaaaaactaagttgcacagtaaacaaggttgtcagagggttaagatgcctgctgacaaggataaaaacttaagttcaatcctcagtacccacaggatggaaggagaaaatcaacccaacaagttttcttcagacttcatgtgtactgcatgacaagaacacatcaaatttaaaagtcggggtgggtagcactacaagaatgttgaagagacacctgatgtcaatctctgactgctacattaacatacaaatgtgtactcagatacatatatacatacatacatacatacataaatacacacacacatgtacacacacatgtactaagtttcatatttgtttccatattttactgtaggaataaaaatggtgactatagcattgatcatggtacttgaaaaggtgagttctaaataaaagcattttgccatctgaatactatcattatcaaaaatgagagagaacatcacaaggacatttcaaattgtaccttaggcactaaattatctgccagaactgtctgcaggatttccttcagatatgaaaacatgaatcagtctgctctgccaggtcttacatctattctatttgtgtaaaaatgtgtcctgaagagccatgctgtgtctaccattgtccttttcactaaggactgcagctctttgcatgaactcctgatagtcactcttcagcagcaatgcagacgttacaggtcggtgtttttaatagagacaaactttgctaactccaaagcatctttgtttgcagcaaaatggaatctctttctttctgaagacagaattctctcctttcttaagagataatacagttgggctgggcaattatctggttatgggactaagcctcaggaagtcaggtgcttaaactatgctaagcatataaagggtttattttattaatcattttatttgtttacatttcaaatagctcccttcccagttacccgtccacaaacccccatctcatccctcctctctctcctccccttgtcctctatgagggtgctcctccacctactcacccactcctgcctcactgctttagcatcccctatgctgtggcatcaagcctccacaggaccaagggtctccagaattgtttttttttttttttttttttttagataattctcctttctagaatgcctactccctcaagcagttcctgtgaggtaccctgaggtttttctgggtctgtgggaatatttgtgttctgaataagaaacttgtcattttccttcttttccgcaattctttattggatgttgccagagcctaagtgtgctctccctggtaaccaggctttcttcctctttctcagaagatcccctccacaccatgtagccacatgccacagtatgggtaacctccatgcctgcttacctgaaacagaatgtcacttcccaccaccaccaccacctttatattttcaattctcttgtgagcagctactgataattttcagcttgctttccttagtggtttcctttttaactctaataaaatttacctcaaatgttccattgagtccattcttaaattattctattatggagacaaagaatcccaagaaggcatctacactttcctggtatcatctgccgaccacaaagaaatttctctcaaatgaccagtaatactacatgcatgcctgttcattgatatgcttgtgtttgcaatcacatgtacatatggagacaaaagttggatataatttacagtcactctcaaatttattttgaggtagggactctcactgagcctggaggtctccattcagctggcattacaggcacacactggaacaacacagctttgtatatgggtcctagcaatacaggtatgataagcactctaattatagcaatctcttcagccataccaacaacttcctttttaattttcttttaggcactcagtttctctacagcaaaatgtgctgattgtcctataggtcatttcctgcctccatgtcttctatgaaattttaaacttaatatgttatgatatgtgttttcaccttgacatcttgtcatatttttatgattaacctctatctatatcttcattttcattcatttttatgagtattttggtcattttattttactatttctgaatttaaatattttctagtatctttgctgcttttagttcatgaagaatctgagtgtcctatttttccagaacattcatatattccactttttaatatctaaatctttgattcactggtaatttgattttggtgcccattgtatgactgagtccagtattacccctttcctcattgcttcctaatctaagcaacactagttaaggattcagaaaggaacatagatccagctgtacctcatggtggctcatcttatagagaccaaactggaaacacgaattctgcaaagtatcccagtaaaaggtacacttatcccttctatcttcttaatatgtgttaagatgaactcagtctcaaggcaaattgtctaatctggaaaaactacagagttaagtacaatgttaagttctatcctacccagatgttctattttcctttttttttctttttaaaataaagttatactatgtaacattgtctgacctgcagttctctatgaataacaggctggcctcaaaattatggagttcttcttttatcttaatgagcctccattaccacactaatattccctctgaagaagagatggtatctctggcctctggataaataaataaataaataaataaataaataaataaataaataaggctacccaggaggaaattatttccttttctttggggtctttttacactgaatttcttagctatttttttttacctgctcttatttgctaccagtgtcagaaaattcaacaaaatctgatatatgtgagactataccttgtgctctgtcatgttctcacaagatactatgagaacaatgttgtgcattcctagtctcatagcacatgtcctttggagcatgttagatcaaattcatgcagaaaaaggaatgctggaaatattaggtatatttgacgtaatttgacacaactcaactaaacatccaacaataatttaaactcataatggcaaaaaatatagaaaagagtaaaacacacactaaccaaaacaaagacagaatcaatttaagaaggaacaaaatggtaaaaacagcaacaataaatacataaataaattaaatcaatcaatcagtcaatcaatcaatcaatcaatcaatgaagcaggcaatcaagtaagcaatcacaggcacagtagataagagcaagacaattttgaaaggtttagaatgcatagatgtaagagagagggacaaagtaacagatctgcagtgctgaaaccttatatgaaatagcagaacctagggctgcagagatatttcaatgggtaaaagtgcttttgccatgaagccctgaattcacatttccagggtgcacagaaaagccataatattctgtcctttctgaggccagctagcctatggaatatgcagtggaaaaatagcaaggggttctgaataaaacaagggacaaattgctaacagacatctcgggttatcctctgaccatcatgtacacacatggacttactgttctagccagattttgtcaatatgtcacaatctagaatcatcttagaagatgaaacctcaggtgatacaatgtctctgtgatattggcctacaggtaatcctataaggccatttctaatgatggaagtgggcagtcaattgtgggtggtgctatctaatggcaggttttattctatgggatagtaaggtagccagaataagccacgaggagggagcctgcaagccatactccttcatggcctctgcatctgttcttgaaacatagaaactgcagatagcattcagttctgtaagttgagttaaagatgtgagttttatgaaagacatagctttatctgaaaacacacaagttgatcaccagtctttcttcaaccattgtgaagctgtggcatacaatagagactcccaagattttccaggtaggactttttcatcagggtctcttctgagatggccattagcttccacctcagggagtaatccaggagctgcaaagatgttggccaatgccttttagaaatataatcctgacatgcatctctgcaatcttttattcttctccattgtggcctgtacccacgtgaaatatatgtcagacatagtccttcctcctttaagttgttcagtcaggtattttgtcacagcaatgagaaaattaactaagccaatcatgagtatgtgaataccaacaaatggaaattaccttgcggttggccagcaaaagaaaagtcactttcccaaagtacaatagacactaagttgaagcaatactgtaaaaatttacctagttcatttctaggttttatgttttttgtgacatatttaaaagttacatttagtgtgtgtgtgtgtgttagtactgactacatgtgtgtgatgatgtttgctgcagaataaatgtgtaggacaaagaagaacatgcagtgtttttttttttctcctcttctaccatgtaggtcccagggacagaactcatgtcatagggtttggcagcaaatactatgactcactgagtcatatcattgattcagtgactgcagcatttagggaaatgctcataggctgtctggttattatccctctttcatgttcatgagaaaaccgcagagacaacatctttcatgtatttatcctcctatgaatataagcatattcagtgagagccacacattctagttgacgttcaggtatatgaagcataccaaaatgcataacaaaggtcctgaacatcatagtcttcaggtaagcatactatcaattaatatattaagttttatcaaaaatatatgaaactagtgtgtgcactttataaggtacatattttgacactattacgtacctctgcttcaaaaaagtgttcctgaataccagagagacttctgtgaatacacgattaaccttgaattcataccaaattataaaacattccaactctctcactctttagttgactgaagtgactcttaagacttgaacttaatgaattatttgatgcttctttcacacttgatcacaatgaattgtaccttcatattactggaatggtgcattagtcacatggcacagaagtcagctaaggtgagaagcttttactagatcttgaacaatgttgggagccactaaagtgttctaggcataactaggtgccataattcaatgtacacatgctgctcagaactataatacattgtgtgatgtactagatatattttttatgtctaagttggctaatgtgttttttaaaaatatattggttctttgtaagtttcacaccatgaatttcagtccaactcgtcttcccctgccctcgtcccaatccttcacccttgtaacctcccctccaacagggagaacaacatcctattgtggaaactgtagtctgtcacagtttttccacagtatactgtccatagtatggaaagtttttccatactttctggcttgcaaattttcattgcaatgactttttggtctggtataaggcccccagcttctgctacattacctacactggatcctcactgggactcctctcagttaccatgtttttccttgtgtagtaggagatcctatagttttgcatcttaaggacaagccattcatgtactccagcagttcatcgatagggtagatgttgacgtgagccctactcaaagtcctggatcttgggaagaaaggtatctgagaagatcaactcaccagctcttcactacccacatcactggggcaagatctccctgtcctgcctcagctgacccatccaatgtcacagccaccaagggacacatccaactctccactccaatgcccttggggctgctcatctgtccccaggtcatcagaacatctctactgtgctgcctaaattaagtaaagggcccactctcttaagcactgcagcttgttatagtctgggtcatctctgctctcaagtctggaaggcaagctctctcacaatgcctgggcagggggtgggggagtaaggcaaattctgcacagccctcaggcatcaacatgtctctgggaaagcagccaacacagggatgtctgcctggccttctatggtaatagacccctcttgctgctgggccactgacccagaaattgcctctggtaccagcacaggtcagaacccaaccatagtcctaggtggtatgatcagttactcacaggctgttcctcactacccttgattctacagttctgcctcccttcattgtgtacacacgtgtcttcttttctttctcttccatttgtctaccacttacttgctccccttagtgccacttgtggggggtctttgagcatctggggtcatcttaggtgtggtctcagaagtgatatgctctgcttatgcattatgtcacaaagaagtgtccatatttggcatggtctatccacccttccctgtgaggttcctgaccggtggttatcttaggctagctcttggtccatgcattacattatgggactgggtactcttttggcatcacttccatcaggggctcatgatcccaggtaaggtagtctcagactcactctcactgaattatattgtcccaggtgggttattcttgtctctgcctcattccctgctctgggagctagtccaggtctgcgcagtgataaactgttggtcctcttagtctagttgcctgtctaggctctctggtgctggattgatggttgtctcaggcttgttcttcttcttttttttcccagggagtgttaggctactagtcaatcagatttccacaggtcagaacactgagcattgacctagcctctttcctctctgctacctactgatgcattttttgacattacagccacacctagagtacctctagaggtgtgattgatatgttcttttaaagaaaccttttatgtattcttacaaatctgttagtgctgctttaatgagagtaacatttatcaaatatacagctctgttaaaactccatgttatgtgacatgtgtgacatgactctgctcatgtgtgatcacacaaaattctctgtgcctcctaggagatgtaagcagggggacatggactgatggtcttgtcaatggatttgacctttggtgaaaattatacttgttgacatatatctgtaaattagtgaccaattgtttggtggtgttggattgaacctggatctcatattacatcactttcagaagcttggaatgtataatgtaaaaaagtgtctctttgtgctggaggatatctcagttggtaaactgcttacttttcaagcatgaaaaccagagtatgatccccagaacatatgaaggccaggtaggttatgcactcttttaatcctcatggagaacaggggtagataggcagagtcttaattctcattggccagacagcctattcaagtaggcaaagaaagaataaagttgtgactagttaaaaaaaaaaaaaaaaaaaaaacaaccttctcatatacaagcatgcaaatccataaacacacacatacacacacacacacaaaaccatacctctcccaaaattgtgtcctcatattttattgttaaaaaagtataacagcttatgtacattataaacttattagccaaatatgtgctgaaccctggtgcaatatgatacatgccatgatacaatgtcacgtggtacacatccatggatcttaaagtttctttagcacaatgaagatagaacattgtgttgatgattttatcttactatactgtggggacatataggcagaatgaaaaccgaaaaagaaaaaaaaaaaaaaaaaaaaaactgaccagggacagagtttaaggtaaatgtagttctgatatgggctaagaataattaattgattaactagttaattaattataataaagtaagggcatatgatttagctttaactctcaattttacacaatcaagaatcacctaagaagagagtctcattgagggattgtccgtattgaattagcttgaagacatgtttgtagggatcatgttaggttaactgggatataaaactccagcccactgtgatgggattattctctaaacaggggttccttgctttagttaggctccctttgctgtgataaacactataagaagagggtttctttcagcttaaagttatagttcttcatgagtgaaagtcagaataagaactcaagccatgaagctagaggtaggaaccaaaaagaggcagtggatgagtactgcttactggcttgctcgtatggcttaatcagtctactttctactgccacttaggacaatcttctgaggagggaactttcctacagtgagctgaatctttccacatcaagtattaatacagcaaatgccctatacgcctctttacactcctgtctaatgggaaatttttctccattgaggtgcctgttttaaaaataaccctatcttgtgaccaaatgacaaaaaaattcaaccagaataatttatgaactgtttgagtggaaaattcaagcagagtataaacaactccacttatatacactcaaatgtgaatttgtttcttggcgtcctgggattcagatgtgaggtgtctaggggcctcaagttccaacaaaagtgacttctctatagtgatggactgtgacctagaattgtgagctaaaataagccttttgttacttgcattactttctttgcagggtattgtttatgcaataaaaatgaaactgaaatattgtacaaggtttttaagtgccagagcactgagctgtacaggcttttggggcctatataggaaggaaagggagaagaatgagaagtgggcctatgtgtgaacaactgactcctgcaggggaatattgagaatcaagcaagtgtttgcctttgtgtctttccagccatctatgagcaatcctgtgaggtatacagacacagaggaaacacagctgggtacttctatgttgactctgatgggagcggcccactgagaccactccaggtgtactgcaatgttactggtaagagtcatattttctaagcctgctcaacctgggtgactgattgtatgagataaaaagggaatttttggaaaagtgtacagagtgtaaaaatacctacaggactagattcatggggggaatgttatcatgaaaaataattggccttagcttagttcttttctattaatatcttttaaatttatttttattatttatgtatttatttattttatactccagattttttaaaaaaattattagaattttttcatttcaatttctttcttccaattttttattaggtatttacttcatttacatttcaaatgctatcccaaaagtcccctatactctccccctgcctgctcgcttacccatccacttccatttcttggccctgttgtttcccctgtactggggcatataaagtttacaagaccaaggggcctctcttcccaatgatggccaactaggccatcttctgctacatatggagctagagacatgagctcttggggtacttagttcatattgttgttccacctatagggttgcagactccttcagctcaatagcttagttattttcaaaacaaaaagtagagagatgtcgatggtcatgacactattctttgaaagaggaggaagttacaaaatgttttctataagtcttggaaaagacagtttctctattaaagcccaacaacagaatgaaatagagatggaaaaataagcacaaaacaaggcatcaaagcaagtggaaagtcctgattcacaaaggggaactccattcacagatggctctatggactgtgtatctggctgagtgctaccatcttgagctttatttgttcatcagtgaaatgagaatgagatgactacacaccaaggagttgtgagggccacagataatcagttctgttggacaagctagtgaggaaccaaaaaaatcttttacctcaaaattactaagatatagtttattctatagcacaaccacagcccaagaacataaatttagtgttgctttaatgagagtaatatttcaagtatacagatctgttaaaactgcaaattactcattctgtcatgctaagggttttatgaagattttattgtgtccattgtatatcagaatacttttcaatatacttgttccccaccatttgggggaattacagtaagcagaaccatctctgctctgagcctcacatgctatatgatggttttcttagcctgtggattcataaacattcataaacatgagttctcttcatctatttcaagagaaattttcagatagtcataagaatgtttggttatgcatagaaattggcaatacagcactgttcaatattccaagattgcccaggaaaattattttaagtcaatcagctttgaataatattcaatgtagatgtagtttcttttactggaaattgtagttcccttgaaaatcactatcaccaccatcatcattaccatcatcatcgagaatatgtgttttctatggaatatcctgagaacatgtaacttctttacaaatcaattgcataggtttagaaatggcatctgaagagatcacaggttgaccaggtactattaggcatttggtactattcctaatgacctaagattaatccctggacctgatatcctggaaggagaaatctgactacaatattcccatatgttctcctctgacttgtaaaattcacagttgttcccatgtatgtgccccatcatgagtataataaatgtataaaaaatgtactttgatggttcatgtattctataatacaattccacagtgccaaacattaatgaaggtttttaaacatttagatttgcaaacagtcttaacatgatggactgtcattaattgggaaatcccccctcccatttctctctctctctctctctctctctctctctctnnnnnnnnnnnnnnnnnnnntactgggagagagatagagacagacagagagagagagagagagagagagagagagagagagagaaaacacagagaagctacataatagaaatagatatccaaggaactactaggctgagatgttgtaaaggacatacatctgaaacacatagtctgatggtagagatttgaccttctgaagtgaaaggtcacccttcagatatatgtgtgtttggtgtgcccagaattcttagataactctagatcctgccagtcttgctggtagtattaaccctcacccacatgaaatatcaaatcttctaaactagcagtcttgaaacagtgatctgatgttaggtagtgattgtagatccaagtatccctcacttaatctcacagttgtccacaggattgaaaactacatatccactctcaacaaagagataaaacaataaagtcttcacctgttctaaatggctatgctatttgtaagactctaggaatctggagtctatcattcttgaaaacaatctatcaggatgaagtacatcctgacattttccttaatctcaaattgtagtcagtttgtggacttttaaaacgtttttcctagaactcagtttgtagtcagcttgtgaatttttaaatgttaacagatacttgaccatctattgaaatatatttatttttaaacttcacaatttttctgttgctcagtagattacatacttatgtgcagagttgtctatggagagtcattcaaaacacacattcccttcctagtttgatagagccaatgccagtttcacatagtagagcaagagagtatagttccatggaacttacagaaaatgtttaggtgaattactaagccaaaaattgttttccgttctcaaacaattcctaatccatatccaatctacctttatagtcttctaatcttactccctgtctattatgatgctccatttctctctgcttggcagcagcctctgtttccattacaattcatcaaagcatgcataatgtaaaaggtagagaattgtgtttgaatgctcttcaataattctagccatgattttaaagtgtgattgaggtaacaggttatcatcccagctattgatggcaagaaaaactgtgtctgcacggtttggcttccattgttagctttgattcctgaagttagattaatggctgtaatttactcattgcatgtatacctgtcagtataaggagaatgaaagacattggaaacataagaataagacattcacaggcatcattttctttacactttgaatgtgcatacagtgttgaacaaatgtattaaagagcaaataagtagaacttagttgttagtgtcatcgtaatggtaatacacttttgtgctggcatctgtctagtgatttccgaactaagcaatatacttctaacaaacacacagaccaacactcatatatatatatctgtcacataagaaaacacattcctgtgaagacatacaaatgcacaaacagatatatagccatacacatgtgtctccacaaacacacaaaaacaaacacacagaacagaagaatatgcagtttccattgttctcccaaagatgggaacaagaataaagtaggtcaagattttagatttcttttacttaaatcatcagttcttggtcatcattgcaaaattactgttttccaggtactgaggagacagcacaatcagtaaggtacttgctttgcaaccatgagcatatagttttaatctctaacacacttgtaaaaacccagctcttctggcacatagcactggggagatacacttggatgaatcctagaccttactaaccaactctggcatctaaacatcaaaagcatatgcacatatgtacttatattttctccccgccccaaagtactatggccaaaaattgtcatttgaattgagactatatacttaatatctactatatatttacttggagaagcatgcatcattgaaggagctagaattgtttatataacaacattactgattagtagaaacaagatagccattatagctatctaagatggaagcactggcactatgagacgtgttttatgccacagaagacctagaacaagttgcattatattttcttcatttatatggttttggccattgctctaaccatgtgatgatgaggcactgggaatatagaaatgattttgatattgggggctgtggatgggctagtctgcaatgttggggctatgcaagcttagaaaatgagtgttgatacccagaattcacatagaaaccagcataaatgtacaagtgtctaatcccagttctgggggaatagataaaagcagatccctggagctcattgccttaccaacgtaactgataattaaacctagatgcacagagagttatatctgatgaatcaaaatgaaatacttattattgaggaaagaatccctgtctgcctgttgctaccacacatacatacacacatgtgcatatgctgccatgtgtatacacatggtgtataaacatagtggatgaggagaattttcacatcttcacactgatgcccttctaatatggctagtcattgttagaagcttgaaatttactttgggaaatctggaaaaggaagaaatgccatagcgaagtccatgatttttaaagaaccattccttctttgggtgaagttggagtcaaggtgaagagaactaactatttaggcattcttactacaaagacaaaacatgacaacttaattctgggaatgttggagactgtactatagttagttcttcctctgtctctgtttttgtctgtgtctgtggaagggatggcaatttttcatcatgtatgttttacttctgtgtatgtaagagtatgaggagtaaaagtcagagaaaaatcttcagcagtaaaatttctccttttattacgtgcaccccagaaattaaacttgaaatccaacactttttcccatggtgctatttctctgtcctcttgcaatactattttaataaaaaaatttaagcagtgttatttgaacagagtggggctctccaagaaagaacaggacatatccagatatgagtatggacttataatgaacagtaaatattgagtgccttaccattggccttatatattattttgctagctctcagggtacatctgacagaagtgttaaaagaccttacacagtgtcctttcttccgagaagtaaaattttagggtagctatagttgtgtctttgagaaggatataattagtaaagctaatatctggagccatttgggttacataaagtgtttctgttgaaagctttggaaaattgaagcttttcagcagaaagagagaaaggcaattatccactatattctagtcctggcttgttcaaaaatcaaccagactcccaggtgaggttctctttgtcaatctcatggctttttcatttttctctgactttatatcttgcctcaatttccccactatatctacaatccctaaaagtaggaccagtgtcctcattaacagtggatttggctcatctttggagaactttggtttcctggtagagattcactgtggttcacttgaaaattaattacttggaataatactagtgtttttgctcctttatatcttagcaacttctattgtggctaacatttcagaaggacagtttgctttcagtaatgaaggattttccaaagaactccaagacatccatcctccagttacaagattcaacttcatatctttattataactttattttcatcattctgttacaaactgtgggctacatggtgcttctacaatgcttgtctatcaagctaaggcctggagtggatcctgaatctctatatgcagaggcctctgctttgaattagtctctcagtgctagcagatggcataatcttctgctaaattgatccattaaacaaaacatctaagtcataaagctgtgtcattacactgaaattaaaacattctcaccttcaaaaggctaagaattttaacagtcacttagaggaattcctttcacccttccatttagcatggccagttgagtccaactacactggagcagaggaatgaggggaggaatcctgagtcctggtgattatcaggctttggactgtcatgcttctctgtatttacccacacatttttcaaattctttattaatctcttacttatttatctatttgtcaactctcttatttatttccttccttgtatatttcagatatgctcctttattgatgcattattcatttatgtagaagttaattcattcaaattacattctaatgttgattgggcttagtaccaaagttcaagcagtgaataaatctgtttttgtcatttaaaactcataaatatattaaatatttaaattaaattaacttttcaaaaagtctacttattgtgtgtgtttgtttgtccatcagtctatctttgaatgtttgtttgtgtctgtgtgtctgtgtgcatttgtcttcatgtggaggccaaaacaatggtgagtgtcgttcctttggtgccatctacctttgttttgaataattaaaccacatttctcattggcctggtgctcacttattcagctggcctcactggccataagctcttggagtagtcttgtctgtttcaactcagcactagcatgcttgacttttcttacctgtttctactgatggaactctgatctttatactcaccaagaaaacactttaccaacagagctttctccaaacctcagattgttttgtgaatctctcaataaattatgtatttgttaatttttatttacttgcttcctcatttgtttatatgagttgaggtttttttaatgcattattcctttagtcaattatgcaaaagttaattcacacaaattatattctaatattgactgagttgaataccaaaatcacaaagtgaatatatctattcttatcctcaaaataatttttttgagagcagacagtgcagtagacagatattttaaattcagtgtggaaaattgggaagccattgatggaacagaaacagaagaaagggaatgaaaagaattgtaccagggaaccaagaactatggtcattcagggtatttttgattagttgccttttgagctaaattttgtgcatatgtctgttggattttatacctatgtgctatattcctgtgtggtgtatagatacacaagtatgtgagcatgtgtcagcagaagtatgcgaaggggtcaccaaaacacaacagatgctagagggcctctcttgaacttggaaataaattgatgattagaaagtctctaaatccccctgactctatgcatcacaaaggttataagcacaagtggctatgtctagctttttatgtggttaatgggtatttaaagtcaggttctcagcttggccaacagatactatttgcccactgaatcatgtctccagtccctgagctgactgtgtagtagaattagctattagttacagcacactaattagcctgaggttcagtattctgcatttcacaaaggaagtggcactgtttcacaccgcctgtatgaagaagatgcattgtctctgttttactgaggaaagtacagaaactaaggtgctaaacatcttgcctctagttgaacataaccctgaaattgtgaggttgtgactgtgatgactaagggctcagtttcacagtgagtctgatgtacagagtggtcatgtgccctatcatgcaaaattcaacttgtactattccttctattgctcaccagaccttcagaaaggactgcacatagcagaggtctccagtaaattactcaccactgctttcctcttctgtaagatggatgtgattaatttctgaggaatgaaagaaaagactataaagctgaggttcttaatgtacaattatctataaagcataagcttagaggggagtttaaaatgtcattctctagctctgttcctggtactgtttattcaatacgtgtgaaggtaagtcagaaacattatgttcattgtgctataatgcttaatgttgtcaacttgtcaatctataatcatctaagagaaaaaacattgtgcatatcactgtgagattttctagattgctttacctaaggtgtgcagacttatgctaaagtggaggtgacatttgatgtgcagcagtccaaaaagtagcaaaaggactgagaataattcagcatttttcacttctgcttcttgacatgggtgtgaagaaattagctttctcaagtttctgctctcatgaatttcttgctctcatgaattctgtgccatgagagattgcaccattgagctctgcaccaaaataaagcctagcttctttaagttgcttttcatatttttcatataaaaatgaagagagtaacttctacatataagtataggcattggcacagatttctttgaagcaatctccctagtccttgagcaaatactaaagccccaactttattcatccttccacagctagggagccctttcttaagatgagtacaagactgtcttgtctggaactgtataaagttttctgtgcagataaatggagtgtccctggatctaggaacaggagaatcaacaaagagcaatcaacattttgctttgtgtcctgtttactgctagcatctatgcaaaagacccatgtgcaacacaaaaataatgtaatttggtcatgaatgcagttttattcagtcacttatatttacttcatatacatatattgatgttttctgcctatggaatcctgcctgtgtactcaacattctcatgggtatgtaaaagagtcatcttacttcaatgtatgtatgtatgtatgcacaagttaagtaaaactaaatgacagggtggattggatgccccagatttatcatatggggttctctaaaacttcctccaaagtgtcaaagggctaaagcatcaaagtacaaaatgaatgcagaggtaggaatgtttgagaaaagtttcatgattccaattcttacccacttgtccatgactactaatgtgccataatctctgtagggaaggctagccatggctggtttcctgcttgggataactcatacctgcttctaaaatgcagctaagtagtgaaatataaacccaagcacaggaacttcatggcttgtaaatatggtacccaagattgtgactattatcattgctgccatcaagatcaagatcaatatgtttagtacatgacgaaagctatttgattatcatcttgtcataacttagaatcttggggacaattttctggtcacttctgtgaagaagtttccattttgtattgaattatgtaagaaaacctaacctaagtatgtgtgacaccattacctgagctgggaacttggactgaatacaaagagtcaatagcactgagcagcatgcctctttttctgctttctgattgtatatggagtgtgaccaactgccccaagctcctgtcttcatgaatttcctgacaggatggcagacagttgaataaggttcattatgccatgtagatgccaagccacacaaccagaggtttgatagcctacatggaccacaatttgacctgaaatataccaagttttttagtactcaggtttgtgttaagaacatatgataagttactatctctgataccaggggtagatagctgacttgaataaggatgacatagaagtagatatcaattccttctaggactttgatgatggagaagaacacacatccagttggagtctcagcactatgctcattgccaagtcctactagacagcctctttgaaaaaaaaaattggaagactggtgtctctgagcaaacaaagagaaacaaagattaaatcccaccttgggatgagttgagtcatgatgtcctgtctgaagatgcttggtttgctcagggattatgaacatatttcctgttaagaagagaaaaataacatgtccagggtcaaaagtacctcatagaatgtttgcttgttcttgctcagttttgctctgagccttagaatccagggtgacatgaacaatcaaagtcagttcacccatctcaaggaatgaaaagagcccaattttactggcagcttgtgacttcttctgtgaaaggaaaaggagagaaacacttcagcagaggacatttcttccgttgctttttccttctatggattatttttgtgtttgttactgccacaaaatacctgagctcaaatacttgtaaagaagtttatttagctcactggttgggttgttgaaattttgttttcttgtttttccgtagtgtgagaggtatcaatgaattgatgcctgtggaacatagaacacaatgtgcaaaagagaaagcaagaaggtttgtcaatgaagcaaggtttcctttgtagcttcctgtagtcattttagtcctgtgagagcaagattctatgggagattacaattagtctacctcaaaccaaattgtatctcttaagttcacaaacttctaaaacatcatctcactcttggtatatcacagaaggaaaacaagtctacagccatgaatcttttggggtcagatcatatctaatgacaagcatgaccccttgatacagaagccccagcctaccatgcattcttaacatgcaagtgcttctctctctgtctatctacctggctatagatgttgactatttctgctataattagagtttaaatgtcctgcacatgtttatatatttgaatacttagtgctgtttggggaagctctggaacctcaagaagtaaaatgtttcttatggttactggggagaaagtcttaaagattgtagtccagccttcttctagtcatttctttctgctttttgattactgttgttatatagtctgatgatttcactgccatgccttctctaccattgcagaacaaaatcatgagccacataaacttcttctgccttatccagcatcattcatgtcctttgtctcacagacaagaaaatgaattaaacacagaaaattgaggcatttccaagctgtgagagctctgtaacacttgcctttcttgtgttttatatgcctttgctctaaagaatttccctcagctgcacttttgtcctaagcaattattttttagctcttatgaagtgctttaaccaggaatatatttatgatcctttgattacatcatgaaaataagagacttctcctaactccaagtgaatgttttttttttcatttctttttgtaattaggtatttatttcatttacatttccaatgctatcccaagagtcccccacacgctcccccacccactcccccatgccccactcccactacttggccctggcgttcccctgtactgagaaatacatataaagtttgcatgaccaatgggcctctctttccactgatggccgattagaccatcttctgatatatgtacagctagagacacgagctctgagggttactggttagttagttcatattgttgttccacctatagggttgctgatccctttagctccttggttactttctctagctcctccattgggggccctgtgatccatccaatagctaactgtgagcatccacttctgtgtttgctaggccccagcaaccgtgggttggtttgaatctaacctgacattttctagctttgtcatattgcttgaattacatgatttcattttcctctttgaaaatgttttcctctgttattaagaataatacctgtttataattttaatatgaagattatatagtataatcactgaaaaccacaggaaaaatgactggcattgtgcatcaaatattcagcccctgttttttttcatattcttgttcaaaacttaagcagtactcctgttttaaatttaattttcaaatttctcagttcctaacttccttccttcctttctctctctctctctctctgcatgtgtatgtgtgttttacttgtctctttctttctgtctatgtcccttgctgtatgtatagtatgtgatatatataccacacatctcatatatatatatatatatatatgatatgtgtatgtataatatgtagctaagaggtaagtatgtaagtatatttcatgaacaattgttcaatgtgtctgtgcaagcatatatgggtgaacatatatgtatgaataaacacatataattcaaaagtcaacattaagagcattcctggatcaccccaccttagtttatgagatagatgcccaagagaatccaaagctggtcacttccccttagttggttgcccactgagctccaaattgttctgtaactgcctctcagtattgattcaggagccaaactcagatccttgaacttataaaagaagcattttactaagagaacaatctctatataccctatttgtttattcttcttttgtctgaattgtctttagttgtaacacaaatttgggaggaaatgaaagagaagaaagactaattttgtctctcaggtacagagctgtcaatcacgcatggtggtgagtctgcttgtagtagtgcagcctggtagtcacacccaagaatggaatgtacagctatttaattttctacttcacttatatcgcatctaaaaccccaaccagagagactttggccttgcattccaggccagtgtccccttcttaattatctagggtcttcacaaacaattaagattaaaataaaaattaaccttcaaagttggcttccatgacagacttttgtagagagcatctagtaattatacaaatttcccatgcagcagttttgattctttattcactgttaggacagtggcaagtaaacctcttgtctaaccttgaaacttcctcttagcagaaacatggtgtcaagctgtttcagtctgaggatgctcagctctattgtttggctgagttagtgtgccagatctcaactgggtggatgatctatcctgattcaaaaacatcaggtatttcctgcagacacatggcaaaagtgccagttccctagcatgtccttgaattttgtaaacatataagaagttatttacatatatgtaaatgttatacatttacaaaacatttctccctcctctgtctctctttccctccgtctttctctcttttatgtatttctctctctttctgtacatctgtatatcttcctctgtctctctaccactcctcttccctgtctatggtaaataaacaaaaaaacaaaacatcatgacaaggacttttacctgataacccatctcactgacactaatacttgtttcaatgttatttatatacagctactaatatcctttcattcagttactgtgttaagtttgcatgccccttggagcatcttgctgatttctacagcaatgaattgatcaaaggttgttctgtcacaaatccttgacaaaactcagttaaggaagggttgatttgggcttacagttgaaggatccatcgtggcaggagtataagatggttatgtacattgccaagaaacagagactgatgaaagccagtttgcagttgaccatttgtctttgtatgaagtctgaaacaacagtatataacataggccagtcacactgaagcctttctttgtcatttaacacagtccagaaacctcctctctgacatgcacagagtcttgtctactagatcctgaaaatattagccataacaagtttactgaacttgtaatgcaaaacacaaaccattaaaatcctcctgattttttgtcttttttaaattaggtatttatttcatttacatttccaatgccatcccaaaagtcccccacatgctcccccacccacccactcccacttcttagccctggcattcccctgtactgaggcagataaagttttcatgaccaatgggcctctctttccactgatggccacctaggccatcttctgatacatatgcagctagagaaacgagctctgaggggtactgggtagttcatattgttgttccacctataggattgtagttccctttagctccttggttactttctctagatcctccattgggggccctgtgatccatcctatagctgactatgagcatccacttctgtgtttgctaggccccggcatagtctcacaagagacagctatatctgggtcctttcagcaaaatcttgctagtgtatgcaatggtgtcagcatttggaagctgattatgggatggatccctggatatggcagtctctagatggtccatcctttcgcctcagctccaaactgttttttgtttctaccctctgtgtctctcttctgtgagacttgctccatggcattaaaatactttctcatttactccattgttcaacacacaacaaacaggctcagaatcatatctatagtatcagagctgatgtcagagtttaagacttccttgagcatcatttagctttcatccttagattgtaatctgctaagagttcatagtcagacaaaacaatgtcatcaggaattacttattattacttactatttttcatttagttctgtggttatttttaacatcttaatgttgatgtaggagttttacttgattaatattcagtagcaaaacttatacttccttcattcttttgatttcatttctgtaagaagttacaatattttaatgttaaacattatgggatggaaatagccacagtcagggtacttattccagtcttaaccaatcacctctattgtatcacatccctaacagcttctcctgtcatccacaagtcataattatatgtgaaaagttatccatgctttttttaaactcccttttaaaagatttatttattttatgtatatggagtattctatctgcatgcacacctgtgtgccagaagatggcatcacaactcattatagatgattgtaacccacctcatgtttgctgggtattgaactcaagacctctgaaaaagagcatctcttaactgttaagctatctctgtagcccccgttttgaaatggagaaagccactgaaaagctgccaccactgtcctttgtgccattgagggtgtaaagtcagcacagaggtagacaaaatctgtaatatttccagaatactttggaggcctaaacaggtctcttcaggttttattagcattttcataagctaattgtgtcgacaatatacctgccattttttctagggattttgtgtgtgtgcgtgtgtgtgtgtgtgtgtgtgtgtgtgtgactgcatccattatatgtgccacgaagtcagtgtaaggttcttctctgccttgtcggatgtttgcctaagccgaggtttttgactcataggaggataacttattctaggcagtaatagtaaggcttgagacagctatcaaattttgttttgatattcttaattattatatagggtgaaaaaatgaccttattccagccaatgtctcatatgtagcctccttattttcttcttgtttgaaggataattcttttctgacctcctcagactccatttttcacaacagaaattgtccgcctgatttttctacatgctgccagtcctgtggcatcaaccaatatgtggccatgctatccagcaagtatattacataaggagatacaggtccatattttgatatagatttcataacttccttcagtaatttacagggaactgcttctcatattggttcaccatctttctcagcagtaaattgactggaaaacagcaacagaagatcgctccattgggtagcctcttggactgcatctcccagccttgtatgaaactgttttttatgttacattttctttctaaacttaattcaccaagtagtgcttgtcaagcaaggtggctaatcctaattatgatactgagcagcctcctcttccaaagtgaaagcatcctgtgatggactggcacttctgattcactttcaggaatagcaagatttgcctgtaaaatctttagcatggagtgtggtgggtggaagctaagctgatgtgggcagtcttagtaaaggtatagtttttcccaaactaatcatatcagagaatgttgactttactgaagctgatttgacagaggttgcactagaatgagttagatcatcaattgtttctgttttggaggtttgcttaatcctactccataagaaaagaccatgctcaggcatttcatcaccttcatggatctccacacacttgcaaagttctttatggacattacactatgtttgagggctcagtgacctttcttcaggtaaccatgaaatttctgtgttaagtcaaagaaatcttgcaagagacttgtatggattttgacaactttcttatcaatagcttgtttcaaagccttaagttacatttctttgttttttgaatttgcttgatccattttttcttagtcattttttattggatattttatttatttacatttcaggtgaaccagataatcaacttcagcaaagtagctggatataaaattaactcatacaaatcagtagccttcttctactcaaaggataaacaggcttaattgccttcctcctccaccttggctcttttgttttgtcctttctgtccacctgataacactgtgtctcctttctcattcttacttccctcttccttcgacttctcccctttttgcttagtcaagtcagggtacaatttgttttttttttccactctctttgccaaacgctctaattcctcttctgtttcgctttctgagctgctcgacgatgtctccttctcagattgtaacgacctctcctattttaactgctccagaacttgctggctagcttctagtgccccgcaacagcattcatcatccaaacagctccttactatcctgcacactgccttcatgtctcccttcaagatcccctgctcccaggcaacatctaagtccctacctagcttctccctgcaagcgactgtgaggttgcctgagatggcgaaccaaggtgcgacgttatggtgagcttcccgataagaaacttttctatggtttttctttgaatttttaaacctttagacttaaggagttcctgaagagctaaagaaatcagatgcaatgagtatgctcccatgatttcacttttactttgtgcctgcttcctggcaactttatattcgcctctgttttatccgtggtccttccctattcaattttactttgtgccttcttcctggcaactttatattcacctctattttatccaaggtccttcccaaaactcctggtgtcgtaagtttcagttaccatgaacttaccctgctggtaaacactgactgctgaaagttctgaactcattagtgggggagtaggttcttcatacgggcgaccacttgtcgaatccattctccaccagcaagaatgacacgatcaccagttcttctaacagcagtttatccagcaagcttcagtcttcatctctctccctcttcatctctctccccctcgaactcccggtctctcactcttatatactctcagaccccatccactcacggcaggtcacatcacctcaccaggcatggcttcagccaatcagggcagcaggagcatgtctccagtaaatatgaacttgtttacactgccagcatcatggtgcacctgcacagttctcatgatggttgtggcttattttcaggtgtatgaggaagtcaggtgcaagtcataagacttagcagcagtcccgggcaccatcttggaactgctgccacaccctctcctcacagtatcagagcaaaaggcatcacaatgggaacatctaagatttcttatctcaaaacatctgcctgcagatgtctggaagctcacttagagtggtggaaatctactgaagcttcatagcacacccatgtcactcaccttatccaataaggccataccttataatccaccccaaggtattttgccaactgagaccaagtatcaaaatatatgcaactaaaggtcctaaactaccactacaaccttttcttcaaatgtggtcaaggttttagaaaagttgcagaatacattttatcatgtgtttgtacttagacttgcaataattaagcatacttttgcatacaaggcatgatattttgcagatcctagaaagcattcagccatgttggaaaggaattgaatgttcttgtggtccacttaatactagatggtaatatctgtgaataatgcttcagaactttatcaaacatagttggctcattggtgtagatctagacacaaacaacctttctcataccaggtcgttgggatgaatggtattttatattttatgtagatgaatattttaatgatttttaactatatatttgtttttttatttttgcttttatgtacgaggacatgttgtgtgtgtgtgtgtgtgtgtgtgtgtgtgtgtgttcaatctgtatgcacacatgtggaagttataggataaatttaggtgctattcttccatcctctattttctttttctttgaagttacacatgaacatggaactcaccacaagtgctatgttgacaggccaggatataatactcagattgtatgcttacatactatagtttcatccttgataataatgagctcatttacagatgcttattgtgttatcattatctattatgtaggtattcttttcaacctgatacttaattgttctctaagaaattacctctaatagtgggtttatagtcaactttcacaggtatcttatccttgtcaaaatttcctatgcaatatagtatggcaacaatttacatatattatttatctcttagtatgtatcaaataatattaggataggttaaagtttaaagtgactgtataaaatacatcaaatgccattttatttgagaaagttgagtatcagtatactttgacatactttagaaagtcttctttcagtcttcttatgggtaaggaagaagactctattgtcaatctttaaagctaatggacattaagtgcacagtataaaacatgtagaataaagattcataagcattaacccaatgcctatttgcctcttgttagcctgaggtagaaccttacaagaaaagaaaagtctctggtccttctataaggactagaatgcgtttgtaccattatctgtctggagtacgcaagtggaggctactttgtcctttgagtgactcatgtttatgtactcttgcttgagctttacttctaacttctcctgatttgcatttttatttgtgcagaggacaagatctggatgacggttcaacacaacaacacagagttgacttggatacagagttccaacactgagaaaccctatgtcatgaacttaaattatggtgggagtatggagcagctggaggctctgattgatggctcagagcactgtgaacaggaggtaacatactactgtaggagatcacacctgcttaacacaccaggtaaggtcctgcccttctttatggtaccacaaaatccacaagccaataatttgctatagtttttctgtcacaagctagagtcattggagaagtgggaacctcaatttaaaagatgtcttcaaatattaattttctccaagactgatgtggagtgctcagacaattatatgtggtactatctctgggtaggtagtcttgaggtgtatttaaaaaaacaatttaaataaacttggaaaagcctgaaggagcaagccaataattagtgttcctccatggcctctgcttcagttcctgcttccagagtcatgcttatgcaaattataagctttccttcccaagttttgtttagtcatggtgttttatcacagcaattgaaactctaagacatttaaaaaaatgtgtatttgataagaagtgggtcacaatgctctttctcactctgctttgaagagagatgtgacccaaagaaggccatgaatcttgagtttgacattcaggcactatctgtggagtctatacttctctctatttcttcagaaagacaccatgacaatacccatcctcaacaattaaaaataaaaatataaatagcctttgaagatagaacatttgagctagacacgtaaagtgtggtagttaaaagctggggggaaaggaaagatggcataaaggatcccagtatatccatacaaacaagaggaatgagttatgtctagaacaaaagatatctaaggatagaataccatgaaagaaaccaaacaaaataatcatatgctactctgagttcacaaaatatattttgctgaaagtatagcaacttcaattgatatgactctaaaaataaattgccatttttaatgaattaattttttattaagatgaaagatcttatgtagtgtacatttggtttgaaattactatgtagctgggaataaccttaaacctcggattatattgtctctacctctgaagtgctgagagtacagttgttttccacattttttggtttaatttctctgtggtgataggcatcaaactcagaactctgttgcatgtctaaaaagcacaatacctatttagctaatagataactgccaaataccagcttcagcttggagaggggttctgaggaaatggtgtgtgggagtggcaaaaacaaatgactcaagtcaaattgagggtccaagctggtgacttatattctactgagagggctttccagattgttctctctgttttctgttttgctatagatagctttttcttgctattataaaagctctctggttgagacagctaggtttcttctagagaaagttctccctgctagtaaaaattctgaatgctctctggatttccaaccaaagtggaaaaaactgctataaaaagaattctgtggatcttccagccaaggccaaaaccctgtgagaaaaattttaaaagtaattcttggattttcgaaccaattcagaaagttcaatatatatatatatatatatatatatatatatatatatataaagattaggaataaaaaaaattttaaaagagctctgtttactcctaagacaggttctctgaatagctacaaataaatattcaaaaaaaggtgagtcagctctctaagtaattcttgggatttctgacagttttgtcacaaatcctgttataaaaaattcttaaagaactatgacaatctctaaaagagctgtgattagtatccatagattttcttactaaaatgagaaatcatattagaaaaaaaattcttgaggagttgttttgttctcgagaccttcagacagctcagatcttgctagagaaaaatgctaaaaaagaactgctatcactttttactagctcatttcatggacaccaaaagcccagtttttgatttgcacatcaattcagttatttattccatgttctcttttgattatcctatgaatcagtatcctataacccggcctcttaattttaagagacagcaagcacatttagttacagagacaaaatttggagctatgaagaaaggatggaccatctagtgattgccatatgcagggatccatcccataatcagcttccaaatgctgacaccattgcatacactagcaagattttgctgaaaggacccagatatagctctcttttgtgagactatgccggggcctagcaaacacagaagtggatgatcacagtcagctattggatgggtcacacggcccccaatggaggagctagagaaattacccaaggagctaaagggaactgcaaccctataggtggaacaacaatatgaactaaccagtatcccggagctcttgtctttagctgcatatgtatcaaaagatggcctagtcggccatcactgcaaagagaggcccattggacttgcaaactttatatgccccagtacaggggaacggcagggccaaaaagggggagtgggtgggtaggggattgggggcgtgggtatgggggacctttgggatagcattgaaaatgtaaacgaggaaaatacctaataaaaaatatttaacattgcccaagaattcagagatctgtctgcatttgtaaacttagctaggtgggtgggaccttgtcctgggattaccattctgaccacacatatacctaaattagctctgtcccaaactgaccttagactcaggatctgcctgcatttatatctttctgacaaattggctcataatgaagctgcccctatgcctttagatttgttgtataaatatagcctgctcagtctatataatgttaaacatatgtatgttttcaatactgaccatttggtcttaggtaatgtgtgttctttcctggagaaggctacttcttccttgcccattaacttgcttggtacagacttgaagaagaaataacgacagttaagaatatacaaactgcaattctaccatttagcagcaaagtcattgaataagactaagaagtgaactcccgcatagcagaggcaaaagctgcggacatttcctcagtagaagtggacccactgtagaattactaatatgcatgattttatgacataggaaatccatatgctagggccaaattagaattattccaaagaccatttaaatgagactgaagaggagaccagtgatgttcagaagtattacattccaagggagttttacaaacacaagagaacagtaaatgctgttgcactgagaacatgctttttaatatggtgaatttgattttcaccagaatagaaatgcttgcacctgaatgccccctcaatattctcctgtgtcatggatgctattgacatatatttggaaaactgatctacatgatgtgctatatgaatttgtttaactaagaatgtagtagatatgacaaaaattgaaaccacacctattaagtttgtgattccccaatatcaaagctgcaaatattgattgtgagtatggttactgtgacttcaacttgctttgtacagactggaagaataaacaaaaccctcctcaatatttctcaagaaatattttctttagatctcttgagagcctatgggaagcctctttaaacaaacaaatctggctgacagggcaatatccccctgagaaaatgtggttgcatcatgagtgtgatccagtctacaatagatcaggctgtctctttagatgttgcaagaggaatgggtttcttttggttagccaactgctgaggatcgagtacttctaggacctcctttgctccatctggatgttcaggaatggtacaccaaccacagtaggatctgagtgacaagtttcacagaatgaggtcatagactttaaaagaaggagacctcctggaactagttgtggaactcttggccagaaaaaaattattgagcagtagttctcttggcaacttatcttttttatctttactattctttttcctaaacatgagatgttcttgatagcctaggctaagatcttaagttagaataatgggtgagaaactatcccttgagatggagttataaaccatgaccttatctctgagaaaaccatgttataaatcatcttgtataatgtattgataaataaaaactttcccaacaacaataaagttttatatggttgtatgtggggcattggaagtaggcttcagtatattgtttaagaacgccttaaatagaaagaattaaaacagtttaaatttatgttttgaagatttatagaaaattaggaactagatgttaaacagtaactgatcataaaatttcattaagttgttgttggaaatttgtctagccatagatgatttatgtatcttactgtgttaaatgattataataatatccattctatctggctgtttcattgaatttatattttttaaagttgaaatacttagatgattttgtattttactgtatcaaatgattattttaatacctgttctatttgactgtttcactgagcacaggtttttagggttgtaatatccgtttctttatacataaaaacctttatttaacagctataaaacatactcagattcaaattgtatctgtgtttgtttctatatgtaatcaccatatgcttacccacctagccttgagaacccacatcccagagaacccctataacctactggggtcatccatggcacaggaatctctaccttcctcattttgatgagtgtttgttgctttttttgattgtggagtagtcactacagggtggagagagggggaaatgcacacattaagcctgtgacacattgattgacagcactattggtggtgggttgttaaaggcctagaaaagacagagtcatgttaaggaaatcttggtcaaggaaggaatcctttaagttggaagtcacctgtatcttattttaaaaagcagatggaaaagttgtaaattatttatttcatctgttttatatagctgataccatgataattatgtatctggaattggtaataacaacttattggtggaaaagaaattgacttacattattagcattattttatcaatctaggatcaaacagtggttattaacataagcagattgacctatgggaggtagaaccaatatgattctttgaagcttaaaagaattttaaaacaacttgaaattaatttaaacaattctggacttaaaaacataagcattatttaggtatttttgttatgagaagggaataagcattttagtaaaaaaaaaatagcaaaagaagcattacatttttaggttttggatgagctgtcttgttccaagctattagcaccagtattccatccttgctgccatcatctgtatatgacctagaggaggaagaaaggctcttccaccatggccagctgccccctccaggttcatgcatgtaggtgactggcagatttcatttccatgcatatgtgtccccttggctgagttttatgacaacctggcaggtgacagtaggagagatgatgataccctctgaaacccctagacaaaaaaatggaagagaaaaggcagactagactctctgtggagccttaggtctgtctctatctttggtgtggcttaatgagcataagcataccctggtgtttttgcccaaacctctctgaggatcaaagccaatctttagcaggacaggatctgaagaagttagcagaaatgcacaggttggactgagcaaatctcttccccatggtatgaagggtatggaaggtagcacataaacctggaagacttctttatttatctgttcctcacaatgcaaaaaggctatgctttgagcaacactgggggcatgtaccataccataaagtgtggaaagagatgtagtgggccaatttgcaggacattctttgccaactatttaagagacatctgttcaggtaccctaaaggtctttgataatttgtttttatctcttttatttatttttatctcattaaaaaggctttattttcttctttatttctcccacctaaaacattagattgcttgaaccaaagctttcctctcctttcctctgactttgtattggctgatccctaacacataatggcaacactatttgagcaacctctgtcctacatgaatctctactgttttgcaggcagctgcaacaagatttctatttctactgtgtagtcagacccaataccctctagaattacatgcatcccttgtatagcttctgcctaatattagcagaactatgctcatgaacaacaaacaataatctcttgtgggcatggtggggggtcagaatttaatattgctaagctgcaagaatcacttaagatataccaaactcataatatgaaaaggcagaacatttattttgcagatattaccagcatgctggaatactccatataaatgtgcaggcttgcaggcccccctttatgcacatgttggggaatttcagggggagtggtagacctttacattgaattgatcagttgacttgtagtactctgatgagacttagcttaccaggacccgctgagtgaacagacatgtagcccggaatgtatgcaaaaagcaagagaaatgtattgttcaaatgcgctggggtcattttatacctgacggagaagtggtgacccagcacagcttatctgatgagcttctatacagttttcagagcaacagccactaggcacaatatgattgacagaacagtgtgacttttaaaacttattggtctttagggaatgaggtggcaaggacttcccttgtctgtaggtggccaatggttggtctatcctttggaatgtgtctacatgctctggaactcccccacctgcaagtgtctgatggttggttgccccctccccttatggtctgagggatattaattagcctttcccttccagagggttaatcttccaggaggggagtgatctgttgaaattttccaaagttcctgagctaactcttcaggctccctctctaggggtagaagtaaatctaagattggtgagtttagaggatataggcaacagaaagttggatacagaaactaagagaagcttaggcctgataattcaattattatcaaactaacaaaaacttaggcctagttctataagctgtcaattttcagtttgtcatggattcaggttggctcagtcctctcatttcccccttgagtaatggctcatcttaaactctttgagatgtttccatagactggtttgttgtttcagaatcatcagttggccagtggaaattcacttcttagtaaacatgcattaattacatagggtccacagatgagttcagttagcaggagcaagactggtcctttctatgatgatatttagcatagttatccagggggaccaggaaaagaatgattcctagcagttttgattttgttgtctaagtttacctcttttctctagtctctgctgtaccatggccaggctatttctgataatgcctgagatgattgtgcagaaacaacgttgttctccaaaggctaggcagagccctctgtgttccaagaacattcctaaccactttctgttttgtagtactacttcagcaaatgagtctgactgtcctaggtaataaatacacttttctttttttttggggggggggggtgcagcgaactttattgatggtattcaatagagtagggagggctccctaggcccctcctgttattatgggggtctgggatggaaattgtgagggagatgctcagtgttgggggctgagttgggatagggcctctctcttgctcagtgtccttgctggggtgggtggtccagggtttcttactccttggaggccatgtaggccatgaggtccaccaccctgttgctgtagccatattcattgtcataccaggaaatgaacttgacaaagttgtcattgagagcaatgccagtcccagcatcgaaggtggaagagtgggagttgctgttgaagtcgcaggagacaacctggtcctcagtgtagcccaagatgcccttcagtgggccctcagatgcctgcttcaccaccttcttgatgtcatcatacttggcaggtttctccaggtggcatgtcagatccactacggacacattgggggtaggaacacggaaggcataccagtgagcttcccgttcagctctgggatgaccttgcccacagccttggtagcaccagtggatgcagggatgatgatgatgcaggctctctgctcctccctgttccagagacagccgcatcttcttgtgcagtgccagcctcaacccgtagacaaaatggtgaaggtcggtgtgaacagatttggccgtattgggcgcctggtcaccagggctgccatctgcagtggcaaagtggagattgttgccatcaacgaccccttcattgacctcaactacatggtctacatgttccagtatgactccacccacggcaaattcaactgcacagtcaaggccgagaatgggaagctcgtcatcaacgggaagcccatcacaatcttccaggaccgagaccccactaacatcaaatggggtgaggccagtgctgagtatgtcgtggagtctactggtgtcttcaccaccatggagaaggccggggcccacttgaagggtggagccaaaagggtcatcatctccgccccttctgccgatgcccccatgtttgtgatgggtgtgaaccacgagaaatatgacaactcactcaagattgtcagcaatgcatcctgcacaaccaaatacacttttctaactgggctatatgtgagtccatgggattgtataaaacatgaagaatcttatccactttgattagcaccagtaccaattcctgaagctacatctgacccaattggcattgtaagcaagattgctaagaccccagcatctcatttttgcctttgctgactcagagccatttccacataggcattgaaaggaaggtaataaacttgagggaacagaataaccaaaacatacaagctggaatttttgagtacctgtggatggacatgaggagttagttaatgcgaaccaagttccattgtacaaggtaggagttgttgtcacctatcataagggtatggttgcaaaaatatttaaggtgagtgaagctatgtagttttccccttcttcctattacacataatccctttccattcagtatttgaatgttgaggacaggggaacttctccaggaacatctcagtgggctatttaggggtgttgacaaattttctgtggtagcctagccagtatagtgtaggggcctgaggtccaggtaaacctgacaatcttctctcatgttagtggtgaaattaataaacctaaaggtaaaatttagctgcctatacaggacagacatgtcaaataccctagagaggggtgtgatggttgagagcaaaactggatttgtaggggaggatggatctaaaattgagaatgatattgaagtttttagggcaattattggcattgacagggccactggttccatagctgtaaggggtagattcaggtgagaccaagtatttttgtatctataagaggaatcccttatggtttcctcctctgtgttgaccctatcaattccctcagcactggagtagttagttgttctgcctatctcgatgaggtccccaactattatgtatccatggggcattcatctcacagctgcaacttttgcaaaagaagctttctgtactatcacaagtcacatagtcatttgtcgctggacatgcatagagtctgatagttccaagttttcagtctttccagtcctcttcacaagttgccttagcagcttgcagttccttatatgacaaacaagatgtacatgttgaacccagatttttacacatatatctggccagaacataaaggtctatgtcaaaaatcgaaatggtaatactcaccagtacagtcagtgtcaaggttggtacctctctccccaagtctataagagttcttctctcagagccttggagtatctgtttgatggtgacaccctgatgggagttatcaacagcagttgttacaagatgcaagatcaggatcaatgaagccaggatgagcagaatcaggatcaatgaagccagggtatgattagctcttcattgctcttaagtaagtcatgtggaagttgttcttggtggggcctcagttgttgggttgtttcttttccagccggtgtccacatctgaattctacccaccttcacagctattggcatggtcaggatcacagtgtgagatcctttccagtgaggttccagagttttctggttatgtctcttaatctagacctcatcacctagttcaaaccaatgatgattagggggaggaacatactcatagacctgacaaatttgggacaagggttgcttctagaccctgtggacagcttccaaggttttcaggaatttgtcttggtcaaatttagctagaatgtcaactggaggttaggtaacatggaagaaggactcccacatattatttcaaaggggatgaaccctaacatataagtggtattcctagccttaaataaggcatgagataagagataccccatcgctgccagtttcaagggttaattttgttaaagcgtccttcagattctgattcatcctctgtcctgaaccttggggtctgtaagcacagtgtaacctctaattagttcccaagatttttaataaagattgagttacctacctgagagaggaatgctagtcttatgtcagaccccagaaaggggggtagaccatacctgagtatgatgtcttctagaatcttcttttccactgtattagaagtttctttcttcatagtgaatgcttctagatattctgaaagggtatctataaaaactaacaaatatttatatccatatattcctggtttcatctcagtttaatctgtttcctatttgacctaaggctgctgggctctaattctagttcctagagtttcttggctggggctggaggagttcacagcctggcaagtggggcaatttgagattacctgatcaaccaagtattaaatattttctattttgctccttgtaacaactctttcagtttctggtagcctaaatgtgaggcttgatgaatttgatgcataaattgtttagcaaattccttggacaggatggtgcaggcttcattagtatggaaccctttgtgtcttctttaaattcctttatatttgatctgatcttatgtatttttcagtggagttttcaggggccatggtgagtgcaatagatggcagaacgatcagagtatgttcattggaaaacatggcaattttctgtgtagctttgtcagtcaacctatatccctacactgaatctgaagtccctattttaatatctgggaaaatatattatggctaccttgagaatgagccataatacttccaataaagcaagtagctcttctttattttaaggtgttttgggttttttgttttatattttttgtttttgtttttctgagtttagttttgttttttttttcttcagaattcagcaacaccctctcttagagtatcaatctatacacatgagctatgacaaaaagcatatctgctgtaagaatagatattgactattgcctcttttgccacttttaaaggctgagtgagagatgttagttcagatttctgggttgatgctcctcgtggcaaggcagttgcccaaacaccaaggtcgaaatacaccactgctaccagtggttctgttctaggtgaaattcctcctgtccatgaagtagatgctcagcatctggacatggtatgacagtcatgcatggcctaagattctgttgtccccacactaaggaacatttatagtatatgcctaaagagaagccaggcagcaaggaaatgaggttcagggatcataacgagttataaattatatgaagggaatttaggagcaggacttaaaaaagcagatgagagagaaagggagagaaagacaaagacagacagacagaagacagaggataggagtagaagctagctatgaacatgtggagagggggaggagaatggagagaaaaaggaaagagagcaagagaagagtgaggaagagtcaagcagccccttttatactgactcaggcatgctggttcttggcaggtaactgtggggcagatcctagaaaggaatgctagcatttcctccactttggcataattaaagaaataagttggaaagaagtgatggtgaagcatgaatatggtcattgtgatctttagctactttctactgagtttgtggccacatatctctgggaaacctgagaaaatgggtacctggatgttggttcagtcttaggaatgttggctgtttccttgctgtacagagtctgtgcaaccatttgtggatagataggaaggcacaggtacaggaaaagcatctgttagagaaaattagagcatctatgagttgcttctctgaagttatcctagatgtagttaacacctagacttgacaagatgacaaaatgcacacacacacacacacacacacacacacacacacacacatgtatacacaaatgcatgcacacacacacacacatatacacacacaaatgcatgcacacacacacacatatatacacacacatatacatatacacatacacatacacatacacacatacatacatacatacatacatacatacatacatacatacatattacaagtagagaataaggtttagtacatttgggagaaaaccgttttttcctaggtgtacgtttgtaacccttaggttttgatgtttgggggtgaagagaggccacagaaaagaaatcccactctctggaataggtaaaaagtgggaacttaggcttttgattaacaggtgtgtttatctggattgaatctatttgttctaagaaaggtagatctgagtgggttttctgtagcttataactttacaaaagaggtaaatatgttaacaactaatgtttttttaacatgaatgtagggaagacaaaaaaatttttttttgcagcaagaagggttttttcctttgtctaggataccgattatacatcaatttagtataacaagaaacaattttaagtttacatttgaaaaaaaaggaaactcaaaaccctgaccttgtgaatatgatatatgatcatatagttttgataagaaatacctttttctatagttaaaagggaacctaaggaaacttttatattttgttatgatagctgatagtatagattcaacattaggaactctttaagcttatctgaaaaggcaattaaaggaaacttaaaattggaacttgtgattaaccagttggatgatatagtagaatactttatttgagctaggctaatttataagaactatatcaattaatgttagggcagtgtcttagcaagaagggaaatgtgaagtattagttactggaaactgagtttagataaggaagtaacaggaatttacatctatgaaagcttatatatgaacttgtgtatcctttactgtgaagcctgtgagcaacgcaaacctgtctatctttgataagaaatctggtagtcttaactagttaacaaattggctaatgagcaaataagttgcattaccttagtgtaagcagctaggtctgttttctagctgtcaagctatagttacgttatcttccaatataatcagaaatctcagaaaaataaattatattctaggagttgtatgtaagtgcaaatgacagaggttcgtctatagcccactacctaaattgttcccaggtccctatggtctctgttgcaacttggacagagttagtctggctgtgaagcccagaagatgaaaagcttttccctgtggagtaggtacttgcaaaagaaatgaccaaccttgacctagccagtatgatacatttaactctctaggtaccctctgtttgtccacagtgtaggccaagccctggcagcatacaaagcaatgaagcagtgtttctcagtgattattataccataatccaggtaacttgggagtgggggctaattgtcaagctttgagggtctctgtcataagctcaaatatttaacagatttctgacaagactgagaataatttgttaagcataatatgagttagacaatctgtgtttctttaattacttgttctagatgtatctagcaaataaagagagcacattttaaattaattgcagtagcaaaacataaggataaacatagatagacagacagatagatagatagatagatagatgatagatagatagatagatagatagatagatagatagatagacagatagacagatagatatgaaagtgatatttaaccttttactgtttagaaatcattatctgccaagacagggtagaatgaaaactttttcttaattaacaggctgaattcctacaggcaacaaattagaatctgtctgtaacaatgataatgatagtagatggtcctaggactgccctcaataaagatgggcgaatgggaacaggaacagagagcaagagagttgttttttaaaatgccagttaaatggccatgtaaagatattgtttgctgtgtagctgaatactatgaattagtcctagagatgtcctactaagtagggacacaaaggtgaagaccttccctttgagtgagggccattattaaaatgtttctacttgtgccccaagaacaaaataataatgataatgagcacccaagcctagacttaccaggtcatatgtggaagctggtggttgagaggatccgagcctatgggtgaacagtttacctaagtttaagatttttctaaagcatcagaaaaaaacacttgggagagggagggggaagtgttcgaggtcctagaacaaggatcaaggaaaagaccagtcataatggctgaatgtctccatcctcggggagagcacaggaggtggctgggagctcaacaaccctcccttgggaccagaggatatttatggtgaccagtggaagattttactagttctcctccaagttcaggtagataagtctgttgatctggtggctgcccaggtggcagggagagatataaatctacaactatctaaatctagagtcttggcaccaatcttatcttatatcttataaaaaagagaaagatgccagagatatgtttggtgaagacacagtatggtgtgggggactgggttgcctctgtggcccatgctgagtcatttttttcccatgagaaacggcaatgtgacagtatagtgtagaatagggtttattcggaacatggggaggggagttgaggaagtagtacagatggagaaagagtcagagagacagagacagagacagagtgacaaataaagtagctacagataaagtagaggccagccataaacatgtggagagtgaggggggaggggaatggggagagaagggacagacaggtgggggaagggtaagagagcaagagaagagaatgaggaggaggcaagcagccccttttataatgagttaggcacacctagtgtggggcagaacctagagggaatgcttaaaccagggcttaatatttgcaggtttagagttgctatggaacaatagagactgaaatgtcaggaaagcatgagtgcaaaatgcctaactcaatacactgtgcaatgcactgtttgactaatctggaatctttagaggaagaaaatgttctacctaaatgaattttccagataactgtcacttacccctttaatcaccaaatgcattccaaagaaaatttaactatttgaaatgtaaatctttctctaatggattgcatgcctccttgccttcttaaacacataattcaggacagaaaatagaacctttatttcataattcaggatcatcactgtgaaatcaattctagacctctgttggatttagtcaggcttggcagactgattgctccttctccgtgttctttcccttgtatctcatttcccacaatcggtcctataaggttcaatatcagtggtttcttgtatatttctctgccccctgataactaagctgaaaacacttgctaccctacacccttctgaggatatcttactctagaaactgctctcctattttgcaatgccttgtcgtgctccactgtttgagttcctagaaaaaaaatagaaatgtgactattccaactgggactttcctaaaggacttaaactgtcatgtcacttgggttatggaatttttataaatatttttgtgtacatatgtgtatccatgcaaacacacaaacatacaatatgttcacacacacacacacacacacacacacacacacacacacacacacacacacacacaatcataatgcccatagaggtaagatgtattggacaaacccaatacttaaatcatattctgttttaagatatgctacttaggtactaagaacaacagcacaatctggcagagtggcatttttagacgctgagccatttatttctctagttcctgctaatcctttgtgtgcattcattgttttcctaactcaattgtattatatattctcttagtttaggcttgcatagattttgtggtgttcatactgggaatgtgctatcaatctagtcctactatcatcttggtttgtgccagtttctttagttttacagttcaatttcaccacttcttaaatttacacaaagatctaaaattcacaatgctaagaagaaaagagaaagacaaacactgtctgcaatccttggactgtaccagtcatccagtaatgaatgtctttgcgcaaagcatccagctcagtagacaagaaccaaagttaatgctctcaaaagaaatgaagaaaaaaagaattttcattttattagttctttgagaaattcaaatgtttccaatgcctaatccctttcccccaattcttcccatattctcaccccagtacccattcaacttcatcttctttttagtattcatcaagtccaatttgtgctacccatatactcattgaggtgtggccttccactagaacatggacaacaatcaggggctacaccctttaagaaaacagatgctctttctctaatagctatcagtggacaacatctccttaggtaggagtggaacatcatgtctacctgtcttaactatgttgatatatttggatggatagagctttaacagatcttgtgctgttagaacctagtggggaaacccccacccaattccggattcagcatgcacccaaaaaatcatgaaggaccatcttgatttaaatacatgaggatgtttaatttcggagctccggacctacatgtatctcacacaggagataacagatgtcggccatgaggctcgaaagctaggggtttttatggggtaaggggcttaggggtgtggaattcagcatagtgacacactattgtcttatttaaacattaacagaaagattacatgtcagcaaaagggcatcaggattttgttcctgggagctgagggcttatctttgttcacatagcaaccagttgatatatgactttgatgtgtgaccggtgtcaaggggcagtagacagaggggaggttccggcctggtggtgttgacccagacaagatagccttgcctgcgtccttgcattttttcatttttacagtcaagctgttcttaggaatgtcttaacaacagccctgtctgttctgctttgttctctgccccaggcagtgtctaggctcacaaacaaccagcaatttttgagtactttacatgacttacaggtcttgaaatttcatgtgtttagctgtcctgttatgtgcagaggacacgctttccatatattcattcactgtctttaactcttacaaaccctagacctcctcttcaggcccttattctatgaaccttagccagctatgtgtcttaatcatcatctactgaaaatagaagcttttctgatgggggttgtgatatgctttgatccctgagaataacactcagttatcatgagtcagtttaatactttttttttcatttaatagaatgatagtagtaggtactctgctaggacctatgatcttgatagccatagaatcctggcctaatgatggtcccaggtatgaatttgatcatattgaaagaaacttcaatctatcagaacgtgattgattatttatgtgatgttcttgccactagagtacctgtgcacctgttattgtatcatgcacggtttacagttagtgacaatgatggtactattctactccaatagagttttattatcaggttttggaggataaacaagcttattgtgcctaatcagagcacctttgtcctaatataatagagctacgttttaactgtgtgtgtgtgtttactgattatttattgtcaggaaattttccaggccccgagaaataagttttataaactaagaatgacaaaataaaaacaatattttatatacatgattatagtcaggatgactgaaaccacacacagagacacaaaagtaagatttatagcactcaaggacagtacatatttaaaatgagacagaaaatacaaaaggagtaagagactggaaagtggacaaatattagagctgccttcaatagtgtggtgttatacttcttgtacaacccaagtgatggggcctctatagcagaaataaagtaattaatgaaagaaagcagggacacaatattcacttctctatattcacaatttctaacacaggggaatcaatggaaggcttaaaggttaccaggatttgcttgtgcattttggcaggacacatgcttttctcctccaattaaactgaatgaaatttgctttggtcttctccattttattattattagccaataaccttcccgccacaggtacacatacacatatacaatatgtaagaatataaatgattattaagtccacatcctttcattataccatgatatccttgaattataaaatagtagaataaaaacagaagcttaatcctatcttccaaaagaaggattaataaccagtaaatatttaaaaacatatttagtactcatagtcaccagaaaatacaaattgaaattatagctatgagagtgcctgttttaaaggaaatggcaaatgctggcaaggaccaggggagcaatgatagaaatataaagtggttcagatactatggaaactaatatggagattcttaaagaaaagtaattagagctttcatcaagctatgtactatgcactatgagtacatacctaaaatatctaatgtagcccattgaagatacttgcacctccatgcctactgccatattatttactgaagccaagatatgaaaatagcttagcttcccgtcaacaaataaatggataaagaaaagatcagtacatacataatggtgttttactcagccatgcagaacaaaattatgccatttttatgaagatagatacaactagagaccattatgttaggtgaaataaaacagactagaaaagagaaatagtgtatcatgccctttctcatgtgttacatcaagaatataattatatgtaattttaatatctatatatgcatatatagtatatatatgtatatatgcatatatagatgcatatttgtggtgcatgtatagaagtcaaaggaggattatgtggtgaattaaaaggaccagaggaaggaaatagagaagagaacagaatataattgagaaaaatatgagcagagtgaaataacatacaaattttataataaaacactttatttttgatgccaaattaaaaattactgtcatgattattgtatattgacatagaaaatatgagtttttattaaaatgttacagaacttgagtgctatattcagaaaggtccaaagttaatgttatcttttgttctacagtgaacttgaagccagcttaaactacctgagatactatctcaataaaattaagaataaaataaaataagtgttatttatgctttctatctaataagaattcatactttctatgctttattattttatgctatggaaaccatgattttcagccctagtaatattgactttaagaaactgaaaatctggttcatgtctgtttttttaaacacatatcactgaatactcttagtaggtacatggaaattttattattattacaactactactgctactactactactactactattattattatcttaatgatggaataataggttgttgaggtcaatgatctatgttcttatatattctaagtgctggaaaccaattgtacttctgccttctttaaagcttggtttgcaatctatcatctgaaacaaaaaagtgaaagaagaatggcttaagaagagaaggaaaatgatataaagaaatctcagttatccaaagaaatggctgacctgctcatattatcaactattgtgtaatcatgtctcatctaccctgctttaaaagttacatctgtcttaggattttactgctgtgaacagacaccatgaccaaggcaagtcttataaaggacaacatttaataggggcagcttacaggttcagaggttcagtccattatcatcaaggcagtaacatggcagcatccaggcaggcatgattcaggaggagctgatagttctacatcttcatctgaaggctgctagcagaatagtgacttccatgaatctagggtgaagatcttaagcccatgcccacagtgttacacctactccaacaggccacgcccccaagcagtgccactccctaggccaagcatattcaaatcatgacagcattcatttctcatttcatgagctctggggcagtgagtatgagtatgttctgggcagagctgtgtgatggttctgtcattcacatatttacagtattggtagttgtcaatgaatgtgacctcatccaagcatgtgtttcttatctcagtttgatgcatggctctctcatacatttggtaatatgctgagtttgatagacagatacttgaagagtggagtcaaccatggggaaatatttcatatttattacctagattgtaagacatgtagcattctatgcccctttatgattcctggttatttcattgatatacagacaagagggcaataattatgttgctctaccctaatgtgaaaagtataagacagatttcacttaggacaatatattctctctctctctctctctttctctctctctctctttacttaatggactaacttcagaaaatgccacaaataaaggggaaaaacccttagtttctctctaactctagttcaaggccttgggaatcttttctctcattagtgaaccaattataactcagtttggccctccatatatgttttttagagacttaatagacaaagtttataggatttttgtcacaaaaaatttaaagatagagacttgtgcaagtgagatcagtcagcaagtaaaggaaaagcctaacaggcctgagattttatttggattccaaggatccatattattaaagggaagaactgattcccacaagttcgcattatgaacactgtgacacacatgcaatttaaaaataaacatagagacaattcatgaatataatcagttatttcactgtgaattaaaacctgttcccttaatattcctctgctaatagacttggtgattatcttgaggcaggaagtcagaatagaattcagtggattcataacaaaggtactacctattctaagtcacagatatggactttaatagaaatgtctgtagccacatttaagttgctgttgtgatcattaattgtttatatgaccagtgtgatttcataagtatgaaaacacagatcctctacaagatatattctgcattttcctcacaacattgtaattgaatgtgttcacttactctggtggttttagtaggtttaggcccatagcccaagtgtttgaatgctttgtccatagggagtgatcctattaggagatatggccatgttggagaaggtatccttgttgggggaagtgtgtcactatagggtgaactttgaagtctctatgctcaagtctcctcctagttcccttaggaccaagatgtagccccaagttctccagccccatgtttgcctcatgatgccatgcttcccaccatgatgatgatggactgaaacccagaatctgaaattgtaaactgtccctaactaaatgtttgccttttataagagttgacttggtaatggtgcctctgaacaacaataaatccctaattaagaaacttactatactgtaaagatacctacagaggaaaaaaaaatccattttttttcaatcctaaaatacagggacagtaacaggaaaagaacatgaaatttggagtcgtataacctaatcttagttattgtgtcatcaacctataaacttataatgtggtttctgttgggtttttgttgttgttgttgtttgttctttggtggtgtggtctcatgtatctcagcctggccttaaaagtgtcaaatagcttaggatgacatcccacattccctcacccatgctggcattccaggcctccactaccccatctcatttaggtgacactggtgaatgtgcccaaaatttgtacttcagagaagcactctattaactgaaccatatcctcaggcccattattatctctgcatctgtgccttaggaatagacaatgagatacagcctgctccttgaaataggggataagaaagttgctcttgttacttcattcagtatcttcttcacatttgctggggaacacaaggaatatgatctccattaccaacaaacagaaagtcttaagacctactcattctgtgtgagaaaattcatctttggagtttaactctaaatagtatataagccatctgtacactagttcacttataaatatggtacataaacatttcaagaaatattcttggccatttcacagaaaagtacagattttttttgactcctgttagctatccatattcactcaggtagctacatatatcatatgaatgcccatatgagcactctcatttgttaaattccagttcaaaattaaaactctttgcttccatacccattgagtatgtcaacatatgttcagacttagagttttgttaaataatgcagcctgctttgtacccttccaagtcaccatggttgtctggtgcagtatacttacttcctttcttgcatcactatatatccaagctctagccttattaacaaaatgttattttcaaaataatattatgaaacttgacttcagatcttttcctctgtctcttacatttccatttttatttttatacttttatatcatttttcattcagccctcaccttgagttttatatgaaactgaaaatctattttattgctctttactgcttaatactaagtttatagtctgcatagatatcattatagacattttcttccaatttacttattgatgttctttgtgccctgattagtagaaggtgagattcagataaagtatatttgtgttatctcatttttgacccccaaatgcttataactgtacttggatatgagagagacttattgactcgttgatgaataagtaaaatatctttcctctccaataagcattagttacctcatgtatgtggcatagaagagaacagttgctgagcaagtgaactaggtcaagcctcctgccacagtgctcacagccagccagccacatcacaaaatagaaactgctggtctgagaagctctgtgattgactctctgtgattgtgaacaagttacttatatattatgggccttgggtttctcctttttagtgctagagattatatttcatgttccccaagtgtcttttctaccatagctctcatatatctacattaaccaaagaatctgagtgaaaatttatgtcagagttgactatttcttgtcacagtaaagaactaaaagtgttgagaaaacagggctcaaaaggccttatttttgaagacacttcggtcagtgacacatagtaaatatttaagtattaagtaatgttttttcttctttaataacccctaccttctcagaaaacactgatttccacacagtaatactgattgagcaaaaaatatgggtctgctgcagtcaagattaattggaaaaaaaaaagagagaaaagtacagcttagtggtaaaacatttgcctaatttgtatgtatttgccctgggttcattctcaggcactataaagtaattaatcattactactaataagtgcaaggaaatatttcttatggtgttagttactattatctctatagatgaactctctgcagctgaaaacaattaccagaagtaattaaatgacacaaggctcatggtttgagataataaatcaggaaaaaaaaaaaaaacagtgggaacagatcataaggctacttactaaagtattcacagaactacaagcaggggatagagagtgtcagcactcttttgcattcctcctttgtctttttcacttactccaagattccagttctatgataatgtcaaccacattcagagtgaatcttctcctcccagttctctctgaaatttctctcacaaatacacatacaattgaggctcactagtgcccttggcattacctaacccagtcaaattgacagtcataattaaccactgcaactttacagggcatataagagagagaatatggggaggaactgcttgcagtcaggggcatttgaggaatcatatggaaatttactacatttgaagtttcttaaaatatattcatttatgaaagaaacctaaatgaaatcactagatcatgagagaggcaatactccaactagaaatctccaagtaaacctccagtatcaggaataggttacatcttgttgcattgctggtcaaagggcccccatagaaacccataaataacttaggctattgccaggtctattgatttctcttccatatctgagaacaagcccctttgctgaatatagcagctatatatctcaatgaatatggagttatctggtgcctaattagagcctttacctgtattgactagtgttcatgatactggaaggtagtctgcattctaccaaaggaaaaatataaatgccaacctgtctacaaatcctgtattctacaatggtgacctgcatgatacattgatagaatggtggcctaaatgacataaaagtaaccaattattttctatcagatttaagactcattacaagagatggaactcatccctaatatcaacattgtggcaaagaacgtgatgttataaaggtcatggacctagatgataactaaatactacttttctagtaaaggaatggagcaagtagaatggcttctaaggagattatgttggtatatccataattcagtgtcttagtcattatcggagaagctttattctgtagtagacaggaactaatatgaagaaagacccacaactagggagagtgaccttgaaatactcagttctgaatggaatgtctccatttaatccttctcatcagaccttgggaaactatgctgaagaggatccagaaaggttgtaagagcctgtcttaattaggattttattgcagtgaagagacactatggccacagcaactcttataaaaggcaaatatttaacaggctgatttagagttcagaggtgtagcttattgtcttcatgactctatcaaggctgttaatccatccttcttaattaagcctcaggcatatttttatgtatgtttgtatgtatgtatgtatgtatgtatttatttatttatttatttatttatttatttatttattgcatgaggacaggaagcagcctctttgccaaaattttacaagaatggtctcttggccattctttagctagagtcagagttaaaaaccaccctgagcaccactcttttccatggttctacctttctggttcctagcacttagatgggcaagtaaccaagaaacttaccttggaattagattttcccgagagtgtctctctaggtatacaaactaagcctaaaagcaggttccattccttgcagcagatgacaacataaatataaactcaatgtttgggattcttttaaattattaccagacttttgcttctattttatagatttcaattttgtctttgtgtgtttgtgcatttgagcatttcttatggtttttttaattttttttttcttgttgtaattgttgttgttaggttgttcattttgttccatgcttatttgcttatcctttctgttttcctgtctattaggagagagaaaaagaagtcttgtagatgaaagggtagagatgtaggaaaggtctggaaggaaatgaggtaagaaaaagtaatcagaatatgctatataaaataactattttgtttaaatcacccccaaaaataaaaacaataaaatgaacacatttaccccttaataatttgctaaggtctcatattcatcacctaatgaaaatgtattagtcaatctctaagaattactaaaatattaatggttgcatcaatttttaaaaacccacatttaaagtgagatttcacactaactccaaaaactttgaaagagaaaagaagctgaaaaaaaaaaaaaaaaaacaaccctgacaaactcaaatacatgtttattcagagtaaatgtgcctattaccaaaggggggagtagagcccagcaaagaagtcataggaacaacacaagactcttcctggaaaaccaacatcctagagctccacatagcatttctgatttgacacacatagtctggtctcagtggcatccttgaaccttactaaaagcctcattcttatatcttctgtcatggtaaatgccatgttctgctgtcagctggatatgtgacgtggatggacactttgagctacagcttcagtggtttcttggcatgtacatggctgaacatatggaaatacttcttaggtgtacttctttgaggataccaggttcactgtctgttcaaacactttctaagagaaagatttcccaatgtgtttatactgttctactctggagctctgaacatgagcagtctggccttgtcaccttttctgtcattatcaagcaaagtctgtgacttttcactaatgacatgataaaaattgcagatactttattttcacttccttatgctcacatttaacttgttgctttccctaccaaagtgcacattttcatgtctttcttttccctctcacaagccatctaaacagagcaaatgtttcatgtgagaaatggttcccatgctttctttaaaattcctcagccaaattctttaccagaatggaatataaataatgtgtagctgagtccatgacacttcatgggtccattgatagctgcctgcctttccgtaagtcttctgatcttctctgtcaccataatggcacttttaacactgcttactgtagcatagtagttttctaggataaagtcctaatttcttcacacttccttcaaaaactagcactggttgtacatagatagggccagagcaggtcaaaaaatgtctaggttcaagatatagtgaatataaaaaaatttaaaattacatatagacaggaatttggaagaggaaacttttaaattccatttgggaggacaggaatggatactgcactagatatggtgatatggagacatgtgggaagaagggcagtcatttcaacaggctgtatagatggcctgaggttagagtcattggtcaaagggtcataagacattacaagaagaagcagcagcattgaagctaggagtgaggagaaaatacatgataagaaaactttcctaatgagaatatatggggtggtatagtgggggaaggagccctgtggaacgcaggctgtgcctgagctttgtcatcttcagtgagagctgggggcagaggttcttagaagcatcccagaaatgtgatcaggttattcactgatccaagagtggcttatggttgactatggaagactgtttccttctgatatggagaaggagattataagaagagtctagagcttctgcagccaaatgtgcatgaacagtcaacacaagaaaataaacataatactgtagggttaagggaactcgtatccactctcccacaggctgctcatggaggcacaacacaggagttttgactgtgcttaccccacgctggcactgggcaggtgttcggatatgggaagcccctggaaaccactccctgggtgggggaacacagtttgaggttcccggggactactagagttggctcactggtcccagggcctgcagggaagccaggaccttctggttctcagactcttggacaccccggtgctgctaggagtaactgaagagctgataatggagtgggggggggggggctccagctgtatctagcctggggccaaagggaaagggaggagagctccacctgggtccagtagggaatagagtccttggcttggtgataatatctgtgagcgctgacaggctttcttcgggagatttggtagccatctcattaggcaaaggtctgttccatagttccccatggtggatcctgatgaaaagagattgtccatggttttaaggcatttatggtcatcacagagagtagtgatgagtaagacttcttagtggagggcttgaggttaaatgttagtgaggagtgtctggaaaggggattttattagctaagtctccaggtctttaggtacctcattaatatggagagctgtcttgcagctatgtgacctgtggtcacatcatctatggaggggcttggggcattgcacttacatgagtgaaggacacaaaactatggatggctatggcctcatatcagtagcctggtactcaggagtgtggcaaaatgccttctgtcccttcagggtcaccggggtttcaagcctgtgctccatcagaaaccaggctgcctttcacagttctacataattctacactaatctctattatattaacaacaaacagatcagtgctaaccaattagcactctcatttgcctaaactcagccaacaaccacagtaagttgtatatacatacatgcatacatggatattaatgtgtatgtgcgtgaatctgcattatccacactcaacattgcattctcacagtaaacaccaaatatgacctcagtggttcagttgtacaaggagacaaaacagctaaaaccagtttcccaggttttcttgacaggctctgattctaaataaatgtaactctagggttataaacatttgtgaagaatgagtgacataaaaggttgagatgatgtccccatacccaaataccctttttcgtgggatatttcccccaacaaagaaaaccaatctttgcattataaaaaaagctgattccagatgccttatgtacataaatatgtaaaatcagtcttagaaatacacacacacacaaacacacacacatcacacacacacttttctatactttctatttctgtataggaggcagataagctaggtagatagaaaaggaaaactggtagcaactggagatctgtactggccagagagtggcaccaaagacacacaatgggatgacaaatttgaaatgagaataacttttttttgacaatatcaggaatgttaaagattatatagtcaaaaatggatattgcttgaagttttacttttttttctaaaattctggctcttcaaagaggcagcagacaaatttacttctcaagacacatgtcaagcttggtaattggcataaagtgtacattgaaaaaaaaacacaaacatttcttatgtctggagagattactcaacagttagcagtaatttgctagtcttctgaaagaccccacttcatttcccaacactcacatagtggctaacaatggtctgtaactctagttttagggatctgacacaatcttctgacatctttgggcattcaacatgcatgtgatgcacatttatgtagacaaaacactcaaaaacataatatatgaaaatgtaaaaaaatttcttaagcttgaaaaacgtgggaatttatagaaactgttgtagaaaagtatgaatttcaatctgtggtttctactctacctggataaaatacacacagcctttacatttacagtaagccataatcagcataagtactggacaaatttctattgtctatgctgttatgtctatttcccagccaaaatcccattacataatttgccatgttttgtctgcactgcttttaactccaatagccaatccacatggccattattttatgactcatctaagccattatagttttgttccactctacaccttccctttactcttgttgttacctgattccaagtttaggaacccttaaccccacctatatctcttcttcccagctattggctgttggcatctttattcacaaatctgaaataacttgggggcaaaatcacacagtgtctttgggatctacatgcagactctctcatctgtgggacaattaggtcttgagacctacaattaccattacagtacataggaaaaaaaaaacaaaacttggcaagaaacttgtttggaaagcaataaacagcatctcttaaattgacaagataactcaatactaaaatagcttaaaatatattgaagacttaaaataatattccatgtgtcaaatagaccagttttctatctgatctgggctagtatatagaataacgcaatagaacttctccagaatattgtagttacttatgtttttggttttgaaaccacatagacaagtaactcaaggaggaaagattttgtttggcttacaattctaggtcacaatccatcatttaggaaagttggcaggaacacaagacaggagatgaggcaggaaccatggagtaacactgcttgctatctgtctcataggctcatacttatctagctgttttacgtattccatgaccacctgcctaggaatggtaccacttataccaggttgagactcttaaataaattaataattaatgaacacactccagcacagatatgcccacaagacattctaatctgggaaattgctcaactgacactcttcttctggtcagtaggctatgccacattgacaaagttaatgtgggacacttttacagaagacagtattctgaaatgcttcctcactggtgggacatatcagttctgatgtaagatccagagaatgggaaaggttaatgttatcatgttcctggaaggtaaacaaaatgaaataattggtgttaaatcttaaggaccacttgcacgaaggaaaagaaaatgggcagatagaaaaaaaagtgttagaaaactgaaatggaaataacaatggcagaaatcatgtgttctcagaagtgctccccgctatttcccattgaagtctgcttcccatcccttcccttcctctcatccttactttgcctgttccctaatcagaatcttgaatgttctaactatctatctccagcaacccttgattgtattacttaaaattgtaaagcacactaagaatatacaagaaacctctaggaaactaagttgtttctaatgctagaactctattttagatcaccatgttagcatgtgtatcttggattttaggtgaaataacatatttgatccatgtcaaaatcaggttaactatttaggttttagaatttttgtttttgttgttgtttattcatgttaattacaataagaaataggacatttacatttgagtaattgttttatttcctttattagaaaggaaaaagtaactttcaaaattaattttatttgttcattgaggctacacatgcatatgtttggcatgcatatgtataaacatgtcttcatatgcaaataaagatttatagctcaaaaatgatacacagggactagggacatggctttgtgtatggcacatgcttgctgtgccagaataaggatttaagattggctcctcagtaccgagagaaggctggattcagcagtgtatgtctgtaatcccagtgtttcttctgcaagacagaatgttgagcagagaggatttccaatgattcctgggttgcctcatctggtatacttagtagtaaacagctaaagggtcttttttttttttttttcattttttattaggtatttagctcatttacatttctaatnnnnnnnnnnnnnnnnnnnntacccacccactccccctttttggccctggcgttcccctgtaccggggcatataaagtttgcaagtccaatgggcctctctttccagtgatggccgactaggccatcttttgatacatatgcagctagagtcaagagctcctgggtactggttagttcataatgttgttccacctatagggttgcagatccctttagctccttgggttctttctctagctcctccattgggagccctgtgatccatccattagctgactgtgagcatccacttctgtgtttgctaggccccggcatagtctcacaagagacagctacatctgggtcctttcaataaaatcttgctagtgtatgcaatggtgtcagcgtttgggtgctgattatggggtgcatccctggatatggcagtctctacatggtccatcctttcatctcagctccaaactttgtctctgtaactccttccatgggtgttttgttcccaattctaaggaggggcatagtgtccacacttcagtcttcattcttcttcagtttcatgtgtttagcaaattgtatcttatatcttgggtatcctaggtttagggctaatatccacttatcagtgagtacatattgtgtgagttcctttgtgaatgtgttatctcactcaggatgatgccctccaggtccatccatttgcctaggaatttcataaattcattcttttaatagctgagtagtactccattgtgtagatgtaccacattttctgtatccattcctctgttgaggggcatctgggttctttccagcttctggctattataaataaggctgatatgaacatagtggagcatgtgttcttcttacccattggggcatcttctggatatatgcccaggagaggtattgcgggatcctccggtagtactatgtccaattttctgaggaaccgccagactgatttccagagtggttgtacaagcctgcaataccaccaacaatggaggagtattcctctttctccacatccatgccagcatctgctgtcacctgaatttttgatcttagccatgctgactggtgtgaggtggaatctcagggttgttttgatttgcatttccctgatgattaaggatgttgaacattttttcaggtgcttctctgccattcggtattcctcaggtgagaattctttgttcaattctgagcccaaagttttaaatcagggactgaaacccatttttcttggaccagaaaatttaatgggtcactcgtgtgctcattcacagttacaccctacacacagacacatacacacacacacacacacacacacacacacacacacacagagggagagagagagaagagagagagagagagaaagagaaagaggaagaggaagaggaagaggaagaggaagaggaagagaaagagaaagagaaagagaaagagaaagagaaagagaaagagaaagagaaagagagaaagagaaagagaaagagaaagagaaagagaaagagaaagagaaagagaaagagaaagagaaagagaaagagaaagagaaagaggaaggcagagacagaaacacagactggcatacatagaacgagacaatgagacagagagtagaaaaatactacttagttatttgagtcagtcatcctacttaatacaagtgggattgtgttgcctgtgcatcttgtctatatatttgcatatttgtgaattgcagaaaactacagtatggattcctgaggacatatttaccctcatgatcagaaacttgtaacaaaacagtcagtggtaacaacctagaccaataagatcctcctcttttttttttttttttgccttactgcacagtgcccataatcatgaacatgtcagcaagcttcccactctgagtacattctagcatgtatctaagcctccccctgtggcctgtctgctgctgcctatatcagttccagggtctatattgatctgtttagtttttttttttttttttaagatgctccaagattgtttgaggtatagcaaagaagcaaagggcatctgagactcttccagaggaggaccccttttccataggagcatatccctagccctcaaccttaatcttcaaaccttagcatgtaagacttttttttcctagcatatgcagttataacatactttaatttataaacttggtacaataagctgtcgtgagctgtaaactatcaggacaattatggctactaattgactgtttggctgctccagtgttgtcttgacacaggatcaattatcctgccaggtgaaaacccttgatatatgatcattcctttcaaaaccacatagaaatacaaatgtatgaattacttgttgctagagatatccactttaaaatttgcaaatgccttgggacttttattgctgttacaaaacaccatgaccaaaaatcaagttgagaggaaaggttttattcagcatacacttctacacttctgttcatcaccaaagaaaatcagaacaggaaatcttcaagttgggatgctagaggcaggggatgttgcagagacaatgaaggggtgcaacttactgacttgctctccatggcttgctcaacctgctctcttacagactctagaacaaccagcctatagaacgcaacactcaataagggttagggccttccctgttgataactaactgaaaaaaatgccttacagctgaatattatagagggatttcctcaactgaagacactttctctctgatgacaacatactgtgtttggaaaggtctgggtaaaatattatagcctaaatggaatattaaggtctagttaagttgttaaggcctaggtaactcttacctagctagcctgccattgattacaaggaacctttcccatatgtttctgctgataataggaaattttctaatgtcaaattgattacatattctgttatgttttatgcccttggaaaccaatcataataaaacttctttgtatggttaccaccagtaaggttagacccaaaccaaccacccagcagcacttcctgtacctatgcataagcttttatggtatatgctattataaggtatgttagggtgtaccccacctccaccaatataggacactatttggaataagacttccattttgagtagtagtcaagtaaagtttaagttttcaagacatccatgggaactgacattctacttaccagaaagaacatgtacatggatatctgataccctggcttgcaagacaagatgtaaatgttagacaaagcaagtcccctttcacagtggaatactccaaccaatgggagcaggataaatgtataacagacaagttcccaagaaaatctccctatctataaatcctgattagtagaataacttgacaaatatgttggtaaatttcaggcatgaaaagcccttcagcaccttaacttgggtcattgttcacctcctgagcgttaattctgtccttgatcagtcagttatggggtgtggtattcaataagtcatctctagttgactggtttgtgtagcagtttccaggccccaacagtatcaagttaatacaaaaccagccagaagggcaagttagagttatgaaggataacatagaatttagaggctttaagaggacccactgatatgttttattataagaaggtagtatttgagaagaaatgaagggaaatatctggatagttaggcgaagttgtctggtgttatgaagtgctttaagtatcattgtatcttgggaaaattaatctgaagaaatggaaaaaaaatggtttcggctgatggtgattagaatactactctgtagggttaacagagaacattgtggtgttgatggatgaaaatctataaagtttccttccttcttggtgatgcttgctctatgctgccacagagaataccttaatttctctttttatctcccaatgtcatatttttttatatctacaactggagcgtcatgtctatagtgtcttagagatatcatgtctttcacagctggcagatgaggttttgcccgctgggcttcagtggtttcatgttagcaatctgggtcacacctgtgtcctggtgggatttcagtggagctaagcatatgaggcacctgtaatcatacatcagtagcctctgacctttgttacatgagtactatcatgctttgggaaatgctaatttcatttctaatcttcagctatgcttgaatacacagtttaactaggggttaagagttatgattctaattaagaggatggagcagttctactacattaccatcaaaagtgcatggaaagcactcccagaggattcattctttaagcagcagccatttccatgtctagtcttgttcctcatttttcttctaacaccacttaatgaaaatttaatactaaaattggctccaatgtttatgagagatcaacggtgatcattgtttctgcttatctctttatcatcccaccaggaaaagatgctaagcacagtatccttaagacagttcgctgtagaggccttaaagatgagaaattatcaagaaatgtatgcagcagaaaaaaaatacaatgtcacttactcatcaaataataaaatgtgaacttatcctcatactaaacttgagaggttattatatagaaagtcatttctataaaggttatatatgaatgacagtatgatggactagggaagtctctggcctttttgcacttactagcctcaatgtggcttcagtttagagtcccagcctgagaaagagttcactttgcattttgacctggggacactgctaaggaaaggcaatgttaaaggagctgagatgttaagtagcaaattgagaggtttagtggcaactgattaacaagaggtattgagggccacatagaaaacagattatgttgaattattaaaagaaagtaaggaaggggtgtgtgttctttattgttctcccttggaatctccagaggttttcagtttgcatgctttgagtttccttttaatgtataaacaaattaaactcaagcttccatttctaaatttttaatgataataagcacctcataatcacaagaacagagagggattgtgggtaaaaagatgtaaagagatggcttaaaaattcttatacaatatttttgcagagaacccaactttggttccaagcccccatatcaggagatactcacaagatacggactctaagagaatcatgaatatattcctgcatgtatgcatgcatgtacaagggtaaaatgcatatacacattatatcttaaaaagaaaataaattttaataaataaattatagaaagaaaaatgtaaggaagaaattcagagcaagaaaggagtaagggagggagagtgggagggagaaggaatggagagagggaaggaatgaaggaaggcaagaaaaaggaagggagagaagagggtgaggggaggaaggaaggaaggatacttcatcaccccactctcatcaatgagcagatcctagaaacagaaactaaacagagacacatggacactaacagaagttatgaaacaagtggacttaatagatatctacagagcattttatcctgaaacaaaaggatataccttcttctcagtacctcatggtacctcctccaaatttgaccatataatcagtcacaaacaggcctcaaaagatacaaaaattttgatattatcccatgtatcctatcagatcactatggactaagtaagactgatcttcaacagcagcataaataatagaaagccaacattcaagtggaaaatgaacaacactctactcaatgatttcttggtcaaggaagaaataacaaaagatattaaggacattttaagagtttaatgaaaatgaagccacaacatacccaaaattatgggacacaatgaaagcagtcctaaaaggaaaactcatagccctgagtacctccaaaaagaaactagagagagcatacactagcagcatgacagcacaactaaaagctctagaactaaagaaagcaaattcacccaagtagagtagacagcaggaaataatcatacttatggctgaaatcaaccaagtggaaacaaaaagaactattcaaagaatcaaccaaaccaggagctggttctttgagaaaatcaacaagatagataaacccttagccagactaactagagggcacagggagagtatcctaattaacaaaatcaaaaatgaaaaaggagacataacaacagaacctgaggaaattgaaaacatcatcagatcctactacaaaaggctatattcaacaaaactggaaaaactggatgaaatagacaatttcctagacagataccaggtaccaaagttaaataaggatcagattaatgatctaagcagtcccatttcccctaaataatagaagcagtccttaatcatctcccaactcccccccccgcaaaaaaaccaagaggaccagatggttttagtgcagagttctatcagaccttcaaagacctaattccaactctcctcaaaatattccacaaaatagaaacagaaagtactgtatctaattcattatattgagccacaattacttagatacctaaaccacacaaaaatccaacaaagaaagagaacttcagaccaatttcccttatgaatactgatgcaaaaatactcaataaaattctagcaaactgaatcccagaacacatcaaaattatcatccatcatgaccacataggcttcatcccagggacgcagggatggtttaatatacagaaatccatcaacataatccactatataaagaagttcaaagacaaaatcacatgatcatctccttagatgctgagaaagcatttgacaaaatccaacagcccttcatgataaaagtcatggaaagatcaggaattcaaggcccataactaaacaaaatcaaagcagtatacagaaaaccagtagccaacatcaaactaaatggagagaaacttgaagcaatcccactaaaatcggggactaggcaaggctgcccactttctccctacctattcactatagtagttgaagtcctagacagagcaattctacaacaaaaggagatcaaagggatacaaattgaaaaggaagaagtcaaaatatcactatttgcagatgatatagtagtatatataagtgaccctaaaaattccaccagagaactcctaaacctgataaacagcttcagtgcagtagccagatataaaattaactcaaacaaatcagtgacctttctctacacaaaggataaacaggatgagaaagaaattagggaaacatcacccttcacaaatagtcaaaaataatataaaataccttggtgtgactctaactaaggcagtgaaagatctatatgataagaacttcaagtcacgaagaaagaaattaaagaagatctcagaagaggaaagatctcccacgctnnnnnnnnnnnnnnnnnnnncctcaaactcagtaaatctgcctgcctttgcctctgaagtgctaggcattaaaggcatgcaataccacacccaacttttttatatagttttttttcttttcttttcttttcttttcttttcttttcttttcttttcttttcttttcttttctcttctcttctcttctcttctcttctcttcttttctgttctcttctcttctcttcttttcttttcctttcttttctcttcttttcttttctttttttctttttttttttgaactggtcattattatgtagaagaatgcaacttgatccattcttatctccttgtacaaagctcacatctaagtggattaaagaactccacataaaaccagagacactgaaatttgtagaggagatagtggggaaaagccttgaagatatgggcacagaggaaaaattcttaaacagaacagcaatggcttgtgctgtaagatcaagaatcaacaaatgtgacctcataaaattgcaaagcttctgtaaggcaaaagataatttcaattagacaaaaaggccattaacagattgagaaaggatttttaccaatcctaaatctgataggggactaatatcaattatatacaaagaggtcaagaagctggactccagaaattcaaataaccccattaaaaatgtggtacagagctaaacaaagaattctcacctgtggaatactgaaggcctgagaagcacctgagaaaatgttcaacatccttaatcatcagggaaatgcaaatcaaaacaaccctgagattccacctcactccagtcagaatggctaagatcaaaaatttaggtgacagcagatgctgtcaaggatgtggagaaagaggaacattcctccattgttggtgggattggaagcttgtacaaccactctggaaatcagtctggtgttccctcagaaaattggacatagtactattggaagatcccgcaatgcctcccctgggcatatacccagaaggtgttccaacttgtaataagaacacatgctccactatgttcatagcagccttatttataataggcagaagctgaaaagaacccagatgtccctcaatagaggaatggatacagaaaatgtggtacatctacacaatgtagtactactcagcaatgaaaaataatgaatttatgaaattcttaggtaaatgggtggatctgggggatatcgtcctgagtaaagttagccaatcacaaaagaactcacttgatacacactcactgataagtgactattagcccagaaacttagaatacccaaggtacaatttgcaaaacacaagaaaatcaagaagaaggaagaccaacccgtggatacttcattcctccttagaatagagaacaatatactcatggaaggagttacagagtttggagctgagaggaaagaatagcccatccagagacctcaccactggggattcatcccatgatcagccaccaaatgcagacactattgcatatgctaccaagattttgctaacaggaccctgatatagctgtctcatatgaggctatgtcagtgcctgcaaatatagaagtggatgttcatattcatctatttgacagaacacacagggcccccaatggaggagctagataaagtacccaaggagctgaaggggtctgcaaacctataggtagaacagcaatatgaactaaccagtacccccagagctagtgtctctagctgcatatgtagtagaagatggcctcgttggccattattgggaagagaggccccttagtcttgcaatcttcatatgccccagtacaggggaatgccagggacaaacaatgggagtgggtgggtaaggggagcagggcggggggagggtataggaaactttttgggatagcatttgaaatgtaaatgaagaaaatatctaataaaaattaaaaaaaaaagattttatagtccatttaaaatgataaacattgcttggatcaccactctctcactctctaatcccctttcctgattgtctttcagcttggattttcaaaaaatttctttactgctcttgtgtaattataagagttctgcctgtgactgacctgtttcattccccttgcctacagcagagcctggaggcagagggttccaagcacaactgggcagcctgtgtctctgcctctcttgagatcctgattaatcctgtgtgcaaaaacagatctgtgtgccttttcttacctgtccttgacaactactctgactgaatcacagatataattgttggcattcattatcaagtaatatttagaatgaccccattctctcacgatgataactataactatagaaacaccattctgagattttataggatattctaaagttaaaaataaatgtttcagatgaaggaattcaatttttccatcaaaaaatttgtgtattagaacatgcggtatcagttaggagttaattgattttatgtcaaaatgaaggtcatttgcaaacacagtttccttatcgatatgatgccaatgttgtgagaattaaagggaaccattcctggggtgatgatacaactcagtattagaactcttgcctaacagacctgtatttcatccccaataccccaaaccaaatgatttaaagaaaactactaatgagttgctgttagcaaaatgaactcttgtgcttcatttagtctccaagatagcttagcatacattattttatcttgtacaagtacccaggttgctaagtattattattactgactgtattatccacatcctgaatccagaagtgataatgtgtcctctatctacttgtatgatttgtttctttatgatcatttattttattttaatgtttattttcaaatgagaagacatttgaattttctgtttggcatttcagctatttcagtgacattggacttggtgattgcacagttgtaatctcttggaaattggatttcttatgtttttcagtttgaacatatcttttggttgtataaacggtttttctttacaaacaacttgcactcaatggcccagttcatggtactactcagaaaagccattttaacaataatagcaccaaccaattaagatgtaggcatacaaggaaaatagatttaagctaacataagtcatcaatgacaataaaaccaaaataaatggcaaaaataatttcaagtaattcagattaaaagtcttttgaataaatgtaaaaacattcaatgaatgaagcatattgcaaaggagaagacataatgtttgcatcatcagccttaacaaatctcaccttcacactgtgagcttatttcaccatccatgacttattgcttgagtgtaggaaatataaaattctaacatctgtttggttctatgtcctctgcttaggagtgaagatatgaggagaggagtgggtctgatcgtttgtcttacagactttcagaaatcgtgatttctctttacagcatctacattgggtggcttacaaactccttgtaacttcagctccaggagacctaataccttttgtactctgcaagctggcaactgcatccatgtgcatagatacacacagatatataaaattaaaacaaaaacaattacttaattacttatcagaagagtattccattcccctggagagagggttacaggtggctgtatgctacctgacatgactagttggaaccaaactccagcaataattgctcttaacttcgagaaaatccctccagtccaagtaaaaagtattgttataaaaaaaaaaggataaaacaaaacaagcaggcaagcaagaaaataaacaaaactagtgctgtgtttccccacctcctgaagaactcccaaagtaagaaattgtattagctattatcatcccccacatcctatcctcacccctaccctgccatatcactaaacaccccttggcatgttgcaggtacttagtgcatgttgatgaattaatgaagtgtaagtgctgttcttccagaatctcaaacttgtcatttgttaaatcatagttgtaaatgtttggtttctcttttagttgtatgcatcctgtgccttttacaaatgcatttcagcagaatggaaaggaagggaacatcagctccactcacatgctctgcactagagggatgcatacatagaaccatgtcatagaagactgcaggctgaattcagagtcataaccttaaatggagtaaggtggactcagagaaacttcatcctctcatgaatagaacctatatttaaatttataaacacacacaaatttataaatgcttgctgtgtggtgtgtgtgtgtgtgcttgtgtgtgtatgtgtgtgtgcttgtgtgtgtgtgtatgaatgtttatgtatctgtgatataaaactagaaacggaatagtcagacagaaggaaaagatcttaagggtagtaaatggaataatggaacgcatggtacataagagcaaaagagggggctaattggcaggaaatgagtttgatctctggagctcaggtgaagatagaagaagtgaagtagcttcacaaaattgtcctttgctcacggacacatcaataataaataagtaaacttaaaaagtacattaggatgatccagaaagacagaaatcagccatagagttgaaggggactaaaggggaagcagtagagatatggattagaactaatattgtaagacacgtgtatatatgcaaatactatgaagaaacttttcagttcataaaaagacaaaaaactgtcaggaatactaatggctcagaagtgcaagccaatccccaggtgtaaagtaacttcaatgcatgtaagacaaacagacttagtaagtaggcagagttaagaaaaaaatccagctgcctggatgcacacccaggggtttttcttaatacaagtagatcctagagtcctctgtttctactcctattggaaacagtaaccacagtcttctcattcacttctttgcattgtgaggcacttaagtttatgtaggtatagcaggagcatccctgtggggagtaaggggattgccctcatctgtctccatattgtagaaaggaaacagaagctctcgaatttccccactaacacatcatgagaaatggctgtgcagatgtaaccatggtttctggataatggtgctgttattactcaggtcttaattcagggtgactgaacattccaaggtcttctgttccaagacagagaataccaccacggaccaatcgttagtaataaagacaggggcagtttaataaaactaagaaagacacttccaagaaagctagttaactggggaaagacatgctagactggtcataggtcatttaattagcagctgcctctcccatatttgcatacagtgagctttttttgagcattttctgtttgataaattggggcaggaagggtagaatgttcttggtcaataggcctctctcctgtgttaatcttaatgatgtcctctccaatctttattctctttctctctctgtaccacagaaccagctttcattactctttctgtggaggtcaaagtaggatgactttcttggttaatctctttgtgattgtggttttgtgtatctcaagtggcgtcatactggtctaactcttcacatctctctctctctctctctctctctctctctctctctctctctctctctctctctctctctctctgcctcaacctgtttttttacttagtagacatgtttttgaagctcgtggatacagacattgtgattttatcgtagaatatgggcatttaggaaagaaatgaaagagagagatagtgagagagagaaggaaagaaagatagattcagagtcttttaagagcaccttagtaaagttttcatgtagataaaagctgatgagaccccagaatccatgcagataacatacgtatattattagccctcccacatcaattgaagttaagttcttcttatcctcagggctctgctccagagacctatcatgtctctttgggtcatacttcctatgtatgccttccctactcttaacctccagaaacacaatatctaggcaatttagatcatgcctgtgtcatcctcactctctacggggatgtctgtgctgtacaatgggacctttgtgtactgagacatagtctggacagcaccatcacaaaatggcgttcgaaatgctttcctctcttagctctgtgtttgctgagtctaaagtttctgtcctttaggccacttactggcaactgtttgtccttgtgtttgtatacagtctccaaggcaatgaatttcatgaggtacccatgattagaagtagaaataggagctgatattttaaaaaggaaaatcattcccaagaatagagtaatctaatggacaggggaaagaatttaaaaataatatctagccaggaaagcatggacacctgtaagacatttcaaggcccacctctcccatttgtatttggcaagtctctcaacttctagcatgatgtgatccttagatgcaactcaggcaaggaagacatctagtagtcctgttcaaattgccttctttcataggctaatatcaatattttcatttccagtccacactctactaccacaaatattttggttgcaaaccatctttgcacatcatacactttctgaagcattgttagcctcctctctggctgtgcatttcccccaggtcaggcagagagaaggatatgatgttatgtctttcaaaatcttttcagggaggttctcatttttacttttgagagcagcttagagctcctagagcatttttggagctttctaaagtctcactggtagtctgtttctctaagatttcatactgaacttcttgttaagctccagtttgctgcaattgaaatcataaccatcagcaggtaagtagatgccagaagggtgctattgttttaataaaatcctaaagtcaccgcgatcccccccagagtcccaaccccattgatgccctagttaaattaaattgcccttgtacaatgtgagtagatatttgctatgaaaatatgagcataatgaggaacatcagggaaatatgagattagaagaaaatgtcaacagtacatttatcacagtactttgcaggaagcgctggggtcctggagtatttcattaccttttcatttctggctaagggcagattaagcaacaggtataaaggaggatgtaccaaaggcaccgtagtctaattaccttcactcagactcagctacttgctgcagcttgtcctgtgtttttgtttgtttttgagatagaaaaaaaaatggctagccctttttcttgaatttcagaaataactttctttaattacttgagttttgtttgggaggtttctttctcaccattttgtggaatggagtgatagctcactcttttaacccctggactcaagtaatccacttgtctcaaccttcacagccaatagaatgccagactctcaccactgtacctgcctgtggtgggacttttgatgtttgcagttctgagtcttgaacaatgagtaaaaactgcctaaaagaacagcacctcccactgccacttctgcaaggcatctggttgtttggaacttcaatatttgttacagcataaaatgtagtattcaatcataattgtaatttacctcttgctaccttcagcctcctgaaaccactttttgaccagctcaatagtcggcacagacatttgtataactaacagattaagagatgactaccttcaatcaactgaaaaactaagatgtaatgtaatgtaatgtaagaaagaattctctctcttgctgaatccagtttaactgacagttctacaagtgtatttagaaaataagttgatttatgatattgttttgtgtgtgtgtgtgtgtgtgtgtgtgtgtgtgtgtgtgctaaaaatactcagggtcttacaaactatagaccaatctctcattaaactacctcctcatctgtgatactgttactggcagggattctggagagtttcctgtatgaggttctgtgtctgaaacaataaattggttaattcatgggatgttaatagtgaagatatggacctattaaaactgactaggaagacagaaaaaacaacccacagtgtgagaatgggcccaggcaagttatagactttcataactatactttatggtttagggctttcagattattggaaaaacaagggagaaaaggaaagaagaaaggaaggaaggaaggaaggaaggaagggagggagagagagagagagaaagagagagagagagagaaagaaagaaagaaggaaagaaagaaagaaaggaaggaaggaaggaaggaaggaaggaaggaagatagggagggaggaaggaaggaagatagggagggagggaggaaggaagggagggagggannnnnnnnnnnnnnnnnnnnnnnnnnnnnnnnnnnnnnnnnnnnnnnnnnnnnnnnnnnnnnnnnnnnnnnnnnnnnnnnnnnnnnnnnnnnnnnnnnngtatgatggagaaggtttcctaggtataatgtagaagatttcttatagatatgtgattgagcatagccagaagccggagcctctagaagtccacagtgagtatggccagactaaactatgttgtgtggggagagaaggggaggggaagggcaagtgcagagagtggaaccaggtgaagcaaccaggaggtacagagaaaataggtaaccaaaatcaatctttaggttatataggaaaaagcagtccagaattctgagctgaagaattcatggtagagggctgttatgccagccaggcgggccctgtgacaggtaggaactgagactgaagggagaacctggtggccaagttcactttaatatgttaaagtaaaaaataatagaaaaagtaagaaataatagtaaaataaaaagcaaaaaccaaaaaccaaaaaaccaacaacaacaataacaacaaaaaaccccaaagtttaaattattcatatatttactataaaactgttcagtcacaaagaacatttcctgaattcacttacatctgaatagcagaagggaatactgtaatgaccaaccatgtaagatagttctttctgaatttgttgttgcaagggataatggcactggaggccttgtgcttgtttgggaccatttttgtaatagtgagaatatttaattgagacgataccacttattttcaggaggtcaggagaacatgctaggtattggctctagtaggtcttaattattaaggagtgtctacaagtagagtgtggctgaagtgtcacttctggtcattggaggggtagtatgtcccttttatggacactgtaactccttgtacttcaggctatttgattagttcattgatttattttttatttttttatttttttttcctgtgctgtggatggaagtcaggatctcatgcatgccatggagggttctatttctaagctgtgtgtgcaagtacaggttagaagttggcatctggtatctttgtccattgctttctactgtatatattgaggcaaagtctccaactggaacgcaaagcttgccagttgggctcgtctagctacccagcttgttgtagggattcactgtctctttgtctagcactctagcactacaatcaggccaccacgtctgcccatcattcacataggcgatggagacctgacttctggttctcatgtttgaggagcacatgttttattccacagacatgtctactttttaccagagaagtctatgaagcattgagagaagtctatgaagcatttcccctcaatttcattaagatttactttcctgccccttaattactttgttcgtgttaaatttgttcaatttatcctctcattgaagcttagctaatagtatatgtacaactatttttttcaaaaaaattacagcaaaatggctataaagaatgtgtagtcattcctgaaaagatttaggaagctatcattcatgcacagactaactagttgcctagtccatctgactgaaccatcatctatgtgatgaattttgggagagagtactttgtgaacagccgtttcagactattcaactgttctttcttaatgtttctactacaaaaggcctgggcatccttcaagacaggtgtacaaagaacatgtttccaacgctaaagttcatcagcagtaaaatagaccgttagatccactgctatggtttagagtctggggtggggaaggaagccaaagcaaagtgtacagccaaagtttcctgaaataaccagaactatcagtatgtggtgaaggttatggtcactcaaatagaaacagagaagtgctgttactatgtgatatctaaacccacattcactgaatatgttttaatcttaaaggcagaactagatatctcagatactcggtatgtgcaaatgcattatatagtaaggaaaataatgactgagcttgtttactttcatccttttaattttagatttaaaatgtaaatgtattacttatgtatgtggtgtatgagtgtatgtgttcatatgtgtctaaggtgcaagtgtgtgtgtgtgtgtgtgtgtgtgtgtgtgtgtgcgtgtgtgtgtgtgtgtataggccagaggttgatgttcagtgtctttttcaattggtcttatattgagacagaggttctgattggacctattgctctcagactgtctagactgaggggccagcatcatcaaggacccacctatctcaactctgattctccaagtttaggcatgggttctgggatagaacccatgtcttcattcttagatagcaaaatctttacccatgaggccattatcccagcctctctgctgcatttctttcattattcaaagattttctagcgagcacttactgtgctgaagtactatcaagccttattctatgccaaggctctggctctacactttttttgttccatttatgtggatttaaaaatagcaatgtttctattcaaaaggttattgaccaaattgggttaaagcaagggacagataacaaaatagactgtttgatagtgcatgcagactcaggaaatttgtgaggcttaatctcatgacatgtaaaataaaggtagtccacattgtgggggacttttaattgtcagggataaacagggaaacaggataaacaatattaatcccagatgattctaagtgaatcataggaagcttgcaaggagacttacatgcattgtataatttaattctaactgcaaaactgtagggtggaaactgctatagtttacatattatattaggagagtggagtttgataagtcacatatcctccccaagacactgaggtaataaatacagggcaggaggtcctcagatccaagacatctgacctcagaggcttgagcaatcannnnnnnnnnnnnnnnnnnntatttgcagtgaccctcaacagtatgcttcattccagggaatggatagttcagtggttaaaacactagctccttgttcaagggacctgaaattgatgtttagcacccatgtcaggtcattcacaatggcccttacctgcagcaccaggtaatctgacaccctttctgtcccatgaagatacctgtacttaattgcacatacccccacacaaacatacaaacacacacacacacacacacacacacacacacacacacacacacatacacacacacacacacacacacacacacacacacaaataaaattaaatcttaaaacagaaacttattttattagtctcatggcttttgttacctcacctaatatctaccacagggatcatatctgtatttgggtatttttctagctaggctctgaggtactccatcttcagactggttaataaagcctgaaatcccctgaatctccaaaatgtcaattacgtgtcaggccatgtgtttctgaatgaacctccacttggatctcttctatttctgcctgccaaagtgcaggagtgcatgtcccacttgcctgttcgatacatgtgagcgggcacctggttccatttttctttcttgccttccttgctattttgaaagctgtgctgaataaatactgaaaatgactgttttctgattctacttcatttctactatgcaatcaatcatcacaatcacctataaaaacacttatgtcaaaggctaaagcagctgataaaatttcattcttgcaggttaggttatgaaatccgagtagccagcatctccacactgaaaggaaagtacttacaaaggttctctgtgatggcttcagattgctgacatatttttaccaccaacaaaagcactttgtgacattcaaacctgaagcacaaaaatcctggagttttagtggcataaactgcacttcttacagctgtgattttcaaaaattgagtgcaatttaatatctagacattcttcctactcaagttagtctctgtgcttaatgtctttaaagcatatggtgacacttagaatgtgagtgtggtgtgtgtgtgtgtgtgtgtgtgtgtttgtgtgtgtgtgtgtgtttgtgtgtgtgtgtgtgtgtgattgagtgtttccatgaacaacattgagaagtataagaaaaagtactgagtttctaagcaaatcaaaagactcaagcaataataatttgatttcctgattcatttttgtgaccatgtaaaggtttgtgtttaactttgtgtgtaacaatgtacatggggaagatagagatcaaactagggtaccatccctcagcagttgctcaccttgtttatttgagacagattttctcattggcttggaactcactcatttggattactcatctggccagtaaacctcagggttctacctgataatacttcccagaacttagtacttaagcgtatctcttaagctttttccatggaatctaggaataccagtgttttatctctgagccatttcttcatctactgttctgtttgttttttaattctaaatatttgctaagcttttcctacatttaattttcacagtttgctgaatacagctgtatttgaagctgtatgatgtagtataatataaaatcaaagatttttagtcatggcttaaaatacatatacttttctgtcttaattgtttctatagagttgctggactgtcctatttcgtgtagtagggaggagagtcaattaacatttttgttcattgttggcttagttgtgggaagcacttagctagatgcatccacatcaagaaagattcataaatattaaacataacacaaatattaaatattaaactgaacacaaaagttttcatgttacaagctcataaacatggtgaacattagtagaaacatactttatgggctagtgatatgcaggttaattctttctcatgatgctgggccacatctgtttcctatcagtcacattgtcatgaagacagtcaagggtcactgtatactgtactgtgatgctggtaagtgtagcatattaggagtgttaaatgcactttcttccttaagatattgtaagattccatggatttttttagaggtcaactttagacacatctgtatttagagacaagacctcttctgaagccactttgtgtacaaggaaaggctggataaggctcctgttttcatagaaaaactgagcactggactctgaagatgatttagtgagcaaagtttgtgatttataataagtgaaaaaaaatccaggatctaaaaatgcaaatagaaacaataagggaatcacaaaatgagacatccctgaaggtagaaaacctaggaaagagatcaggactcatagatgcaagcatcaccaatcgaatacaagagatagaacagagaaactgaggcatagaagataccacagtaaacattaacacaacagtcaaaaaaaatgtaagatgtaaaaatctcctaactcaaaacatccaggaaatccaggacaaaaagagaagacaatattagaagaagaaaaatatctaagaatattaggcaaggattcacaattcaaatggccagtaaacatcttcaacaaaattatagaagaaaacttccctaacctaaagaaagagattcccataaacacataagaaacctacagaatcccaaatagattggaccagaagagaaattcttcccatcacatagtattcaaaacaccaaatgcaaaaaaacaaagaaaggatattaaaagcagtaagggaaaatagtcaagtaacatataaaggcagatctatcagaattatactagacttctcaacaaagactcaaaaagccagaagatcctgggcaaatgtcatatagaccctaggagaacaaaaatgccagcccagactactatacccagcaaaactcttaattaccaaagagggaaaaaaaaatcaagatattctatgacaaaaccagttaaacaatatctatccacaaatctagcccaaaaaaaggagggaaactatttccaagaaaaagcaagaaattaatctttaaacaaacccaaaagaagatagccacaaaacttaattctacttctaacaagacaaataagtgtaagcaaaaatcattggttcttaatatttcttaccatcaatggattcaattctccaattgaaaatacatagactaacagaacagatttgtaaagtaaatagcacccatccttttgcagcatagaggaaatgcacctcaattaaaaagaaagattctactcagagtaaaatgctgggaaaaaattccaagcaacaagctggcatagccattttaatatctattaaaactgacactcaaccaaaagttataaaaaaaatgagaaaaaacatttcatactcatctaagtgaaaatctgccaagatgaattctcagttctgaataactatgccgcaaatgctagggcatccacattcataaaagaaacttcactgaagttcaaagtacacattgtacttcacaaaatattacaggaagacttcaacaccccagtctcaccaatggacatatcatagaaacagaacagaaactaaacagagatacaataaaactaacagaagtaatgaaccatacggatttaacagacatttatagaacatttcatcctaaaacaaaagaatgtaccttcttttcagtacctcatggtaccttctccaaaactgaccatagaatcagtcacaaaataagccttaagagatacaaaacatttgaaattatcctgtgcatcctaacagatctccatggaataaggctggccttcaataacaacaaaaacaatagaaaacccacatataactctcaactcaatgataatttggtcatggaagaaataaaaaaagaaattaaagactttttataatttgatgaaaatgaaagaacaacattcccaaacatgggaaacaatggaagcagtgctaagaggaaaactaatagtttcctagagtgcttccctaaatatattggggagaacatacactagtagcttaacagcacatctgaaagctctacaacaaaaagaagcaatacactcaaaaggagtaggcagcaggaaataatcaagctcagggctgaaatcaaccaaatggaaacaaagagaactatataaagaatcaacaaaaccagttttgtttgtttctttcttttttcttttttcttttttcttttttcttttttcttttcttttcttttttttaaatcaccaacaagatagataaacccttaatcagacttaccagagggtacaaagacagaatccaaaatgacaaaatcagaaatgaaaagggagatataacaacagaaattgaagaaatttttaaaaatcatcaggtcatactacaaaagcctaatacaacagaactggaaaatatggatgaaatggacaattttctagacagataccaggaaccaaagataaaccactatcagataaaccagctaaacagtcccataaccccttagaaaatagaatcaatctataaatgtttctcaaccaaaaaaagtccaggaccagatggtttgagtgcagaattatgtcagtcattaaaaggatatctaatacccatactcttcaaactattccacaaaatagaaacagaaggaatactacctaattcattttatgaagctacaattgcactgaaaccaaaaccacacaaaggcccaacaaaaaaagaaaacatcaaactaatttcccttgtgaatattgatgggaaaataatcaataacattctcacaaatcaaatccaagaacacatcaaaatgatcactcatcatgatcaagtaggctttatcccttggctgcagggatggtttaatatatggaaatctatcagtgtaatatactacatacacaaactcaaagaagaaaaaccacatgatcatctcattcgatgctgaaaaatcatttgacaaaattcaacaccatttcacgtataaaagtcttggaaagaacataaattcaaggcccatacctaaacatagtaaaagcaatatatagcaaaccagtagctaacataaaactaaatggagagaaagttgaaaaaaaatccattaaaatgagggactagacaaggttgccaattatttctgttatctattctatatattgcttgaagttcttgctaaagtaattagacaacaaatggaggtcaaaaggatacaggttggaaagggagaaggcaaaatatcactgtttacagattataggatagtatatttaagtgaccccaaaaattccagcagaaaactccttcatttgatatgtaacttcagcaaagttgccagatataaaattaactcaaacaaatcagtagtcttcctctactcaaaggataaacattctgtgcaagaaattaggaaaatgacacacttcaaaatagtcaccaataatataaagtatcttgctgtgagtttaacaaagtgagtgaaagatctgtatgaaaagaagttcaactctcttaagaaagaaattgaagaagtcctcagaagatggaaagatctcccatactcctggatcagcagtattaacatagtaaaaatgattattttttttaccacaagcaatctacagattcaatataatccttatcaaaattcaaacttaattcttcacaatgatagaaaaagaaaatctcaaattcatttggaacaacaaaaatacaggatagtgaaaacaattctcaaagataagaaaatttctcagggaatcaccgtcccgaactcaagctctactacagagcaatagtgacaaaaaccacatgttattgatatagagacaggcatgtagataaatggaatagaactgaagacccagaaatgaactcacagacctatagtcacttgttctatgacaaaggatctaaccatccagtggaaaaaaagagagcacattcaacaaatgatgctggttgatattcagtcagcaggtagaagaatgcaaattgacacattcttttctctgtatacaaagctcaagtccaagaggataaaagacctccaaataaaacgagatatacttaatctcttagaagagaaactaggaaagagactcgaaaacataggcatgggggaaaatttcctgaatacaacatcaatggcccagtctctaagatccactatagacaaatgggatctcataaaattgcaaagcttctgtaaggcaaaggatactgtcatcaggacaaaatggcaatgtatagattgggaaaagatcattaccaatcctacatccaatagaagacagatattcaatatatacaaagaatgaaagaagagagacaccagagaaccaaataaccctatttaaaaatgaggtacagagctaaacaaagaattctcaactgaggaatctttcatggcaaataagcacccaaagaaatgttcagcatcagggaaatgcaaatcaaaatgaccgtgagatttcacctcacaacagtcagaatggctaagttaaaaagctcaggtgacagcagatgctagaaacgatgtgaaggaagagaaacactcctccattgttggtgggattataagctagtaaaaccactctgcaaatcagtctggtggttcctcagaaaattggacatagtactacatgaggacacagctatacaactctgggcatatgcgcaaaagatgctctaaaatataacaaagacacttgctccactatattcatagcagtcttatatataatacccagaagctggaaacaacccagatgtccctgaatggaggaatagatacagaaaatgtggtacatttacacggtggtgcactacatagccattaaaaataatgacttcatgaaattcttagacatatggatggaagtagaaaataccatcctcagtgaggtaacacagtcacaaaatatcacacatggtatgaactcactgataagtggatattagaaaaaatgttttaaatacacaagatacaagttagagaccatatgaagctcaagaagaatgaagaccaatgttaggatgcttcaatcctacttgcaaggcagatcaaaaaaatcatggaaggtagagggtggaagtggttatagaggaaaagagaatggagagaggaataaaagggcaggatcaggtgtggtaggagatagagatatacagagggtcaaagaattgaacagaggtgtgtagaaaggggggatgcagaaccagggatagccaacagaaagtctcagatgccaggaaagtaagaggctcccaggacctaacagggatgatattagctaaaatacctaacaaaggggagagagaacctgcacagaccatatccataggtaaggcatggcctccaattgagggactgggccacacagccttcttaaaattttaacctggaattgctcctgtctaaaggaactacagggaccaagagtggagcaatgattaaagaaaaagtacatccagagactgccccatgtggggatccatctcatatgaaagctccaaagccagtcactattactgatgccaagaagtgctttctaacaggagcctgatatggatgtcttctgagaggctctgccaaaacctgaacaatacacacgtgaatgctttcagccaaccattggactgagcacaggcctccaatggaggaattaggaaaaggactgaagtaactgaaggagtttccaaccccttaggaagaacaacagtatcagccaaccagacaccccagagttcccaggtactaaactaccaatcaaagaacacacatggagggacccatggctccagctacatatgtagaagaggatggctttatttggcatcagtgggaggggaggcattaggttctgtgaaggcttgatgcctcaatgtaggggaatgctagggcagtgaggagacagtgggtggatgggtaggggagcaccctcatagaagctgggggagaggagagcagataggggacttggggaggctaaaccagaaaaggggaaaatttttggaatctaaataaataaaataaccaataaaattaaaaaaaaaaagaagaaacattagatttgatcctcagaacctgtgtttttaaaaatcatctggttggtacacaaatggaatcccagtgctcaagagaaagaggtagggcattcatgtggcttgctggctagataacctcacttgctttatgacaatcaattcaatgaaaaacactgtctcaagaataaagaaggtcactggcatctgaggagtgatcctggagattgtcctttaatgctttggccttaattgcatcttcacacatgtgaatgcacacacacacacacacacacacacacacacacacacacacacacacagatagacagagagatggggagagagagagatttgaaatgacacaaaaacactggaaagctgggagcaaattagtcttgcataaattaagtggttgaagaacacttaatagaagaatgagatttagtcagatggtgaatattctctaaatgtgggtctcaacagcagagaaaacctagaactacatggaagtagagaaaaaagagaaaggggaacagcttttcctgtgctccagatgtaccagctgaataaccattactttatgttatgtttatgtgggaagcagctccctcagacattcaatctcacagtcacctgacaaaaaattgtttaagaagctttaagcaaggacataaaaggaaccattcagcaagatcagttgactctgtagaggtgtcagaaacaacaaaacagttcactacttttgcaaggtctttggctgactagtcgatttcataatggtagatcagcaagatactgatgaattgaaggactgataaaattggtacaaacacatggacattatacatccagcagtaattaggagtactttgtcatctctgaacttctgcatatgatttttaagtgaattatgtaaaatctcaagtatagattttcccaatcagatctatccactaaaatactgtcatggtagatgtgttccataggcacaatgtcatgaaaagttgacttctagccttcatatgcacacacaaacttgtacatgaatctattagtgtggtgtgtgcactgacacattaccagaggtcacactgtgtggaattggtgtttctatatccttgatgtatattcagaaagtcagaaataaacacaaagattatagggtagcaagtgaaatttattcacaatcaaagtgataataaaaatcttttgtgctatacacaagcaatgggcttcttgaactgcagtactcaaagacttagatgactgtctcccagatttcctttttgaggtcttagagtaggaaaagtttggttgtcaagaatcatagtacagggatttctcttgttttgattgacaagcatagattctgtaaactgtgagcatttttcttaaggatatactctttttccacaataaatctgattttactcatggatatgtccaagtggaagttctaggttgccaagggcagaaaaaaaaaattggttgtgtatgtaaaacaggctaagtcaaggctgaggttgttaatttattttctttatttgcctaacacacagaggaggtatttaaaatgaggtacctaacttttggttctattaaacttaaatcacaattgaatacttttttagacaacatagctctaaaactaagagcagatttatttgagtaatgcttcatgcaattcatcccttttgaaattcagattgagttactggattcaggggtttgaatgaaaattgccctcccccctcccaccctgctgcacccccccaagacatgtagacatgcccaagcatatgtgtgtacacatgcacagacacacagacacacacatacacacacacagacacacacacacacacacacacacacacacacacaaagccaaaggctcatatatttgcatagttggtctttagattgtggaactatttagtaaagattatgagatgcagtctagttggatgtgtgtcactgggtgggatttgaggttcaaaatcccacataattttcaagtagagctctttccctgtccccacctctctatctctttctctgtctctgttttctctctctctctctctctctctctctctctctctatatatatatatatatatatatatatatatctgtctcctttgatttttgcttttatgcttgtacatcagataaaagctctcagctacccaattaaacagttatatttctgaattaactataatcctcagtctgatagtgagagtttggtctcaactgatcctcttgctccagtctcctggagagatgggaatgtggttatgattaaacttgcctgactttggcatgggtttctttgaaatgcaactgtccctgagccttttgacaatgagatcttcggaacttctgacatggttaatttttcatagcaaaagagttctaaggaggtttggggattcccaatattttagacagtgaaatgttatagtgtaggttgaaatttgaaatccttaattgggtagccacataggaaacagactacgaaactgagatagactgaaagccagagacacaatctgattccatgtttgacattctgaggaagaaagggaataggctcaaatttcaggaaaaagtaagttttatttatttttaagaaaaaggaagtataaaaactagaatcaaaacaagtggcagaagctctgaaagagtatgtgacaaagtaaatggcccaacaagaatgaaagcatctgtgtaggaggaaaggcctatgtttggaaatagcaataagacagtaaggaccatacttggagggaaatctcaaaagaaaggcatagtatataggattgcatggggctattaagtaagcattcactgtacaactaataaaattcattgcccttaaataatgattcacatcagaattaattactgcaagcagagataaagggtgcctcctgcagataaagtcaattatcttatattaatctaaatgcattatgaaaaattaactaggagaatttagctgtaaaacatggttaaaaaataaatggagaggaaaatactgagtttagtagtaatacccatgtatgaggactacggttgaaggccaggatcatgtcaggtttcatcctttattgatttttgtgacagtatattttcattaaaactggaatccaacagttcagctagactccatcaagttctggggatgcagccatcttcagttgcaagcactgaggctacagactcaagatttcccatgagtgctagaaaccaagctcagattctcctgcttttaaaacagacactttactgactaagccttcctttcatccctgaattctgttttaagacactaagtagctgacaaaatgagaaattccattaatcagcacaaggacattgggatacctactcttagattttgctattctacagagatcaaggagaggaatgtgtcataagtgacatgaataagatgtgagaaactgacattcttcaattttttatgagatgaactcctcactagcttctcctaaacaaaaacatgcatgggctccacctcacctaccaaatatccaggcttatccacaatgccattatctgctctcttgtctataagcattaaaatgtatcatattgaaagttggtaatgtacaaagaaaataataaacttcaaaatataagtacaatcttactgaatgagcactagtttcacatgattaatatcaattatgttccttaaagcttatgacaatatactaaacaaaacaacttaaaaagaaaagagagagaaaaagaacgaaaggtggatttggtgatttcaggtactctctaccatggaggacaaaggcaagaaagccagagcactttatagccactttcaagaggcagagagatggaaacttgtgttcagcttgcttcctcctttttatatagtgcagcaccccaagccattagagggtgatccccacattcatgcactgtagttctttctgcttaattaacctaatctacagtccccttacctacagagtggtagcatccacgataaaaaatattattgagttgataatcaagatttatctttgaaaaaagagttattaaaagttaagaatcatctatgggagtgttactgagagtcaatgagggttaatatggactaaaatcaagagaaaaggggttgttgcaagtttggtcactttgtgcactctttccttttgtttccaagtagaacacaagaacctgtaacactttattatattccctccacacttaatatcaatttgttttatgtatattaatttattacttaagcacaaaaattatgtgatttttgtttttatgtcttctttatatagaagattgtcctctagattcatgtaaattatgaaaaatggagcagtctgctttttagagttaaataacacacatatgccacatagttttctttaattaatgaacacatatgttcaatccacattttgactatggttatgaacatggggagatatacatcttataaggctgctgttgttaatattaagagattgcatgttccacacagatattagtagacaaataccacctttctcctaaagaagagcttgaatagtagttattagtcatcccacagatggccatgacagagctggagaaagagatggagatagagagaaacacaaacacacatacacatacacacacacacacacacacacacacacacacacacacacacacagaaagagagagagggagagagagagagagagagagagagagagagagagagagagagaattgtccagtttctgaacagagttttttttgtttggttggttttgttttgtttggttctgtttttacttacacagattctagatgacaggggaaggttcatgtacattgctgtagcctaaccaggacctagaaagtaagtcagctaaagataaaatggtaaagctataattcagtgcaaccttggggttggacatgtggctagattatctacaatgagtatgagaggctataaggccacagagattctctgtagctatgccttcagagcaagagggcagttttgtattgcctatttttggaagagagacaataaaagcaacatatggggatttattaggttaggttagacaataatgtattggtagtctagcaatggctgcctcacaccacagaagccaagaatctagtactttttcagttcacaaagcagaaaatttcagtggtccaaatttgacatctatgatggctattcctggttgtcatcatgactacttctggaatgaactacaatccataaatggagggtacacctacaacccacatcttaacgctggaagacacagatttctgacccagatcttgacatgaagatcttgaggcatagttgccatgaaaaagttagggctaggcaaggtagtataagccttcaatcccaggagacaagtcaagactgagttaagcagatctctgagttcaaggaaagcctaagacaaataaattcgaaatccaggtgtagtggtacacaactttagtctgggcaaaccatctgttggaggcctaactaagaacattggaagaaagaagactcactcttctttgcccgctggcacttacttgacagcacatctgttggaacctaattcttcaggatttccggtttataaagaaagccaggttaaacaactcactctgtgggattgagcagctactagaattttggactaggcggagtattacaagtatttaatcccaggagacaagtcaagactgagttaagcagatttttgagttcaaggaaagctttaagacaagtaaattccaaatccaggtgtggtggtacacagctttagtcttgtattcagagctgcccattgttgggttagttgaaatgtagactataagtcattaaaataatttcccttaatacagaaaaacattcaaaaagttctgtgactcaaaagaacactgactagtacagcatcaaaggccaaggactcctgtagaactaatcttcagtctaaattagactactggaatcctaggttctaatactattgcaggaatgctgcatcgatggaatagatatacttgccagtgagagtgagggcaagcacgcagaaaggaaatatccttcttctctgtccttttatttgaactgcctacagaaggtaatgttcaaattttgggttggtttttctgcttcaaatgatctaaaaaagaatattcttcacagtattgtctactggcttccatattaattgatgacagatccagtcaagttgacaggcatgactagccaccacaatttatatactcagaaatagaattatttggtcataaattagttttctatttgatttatttagagacatctattttgttttctataatgtcagaaccaatctatatctccacgcaatgtacaagggattcccttttgccatacctccttgtcaagtttcacgcaatgtacaagggttccattttgccatacttccttgtcaagtttcactgttataactggttctttctcgctttccctctcttccctccatttcacttaccttccctcttttttgaggaggtctaattagttgccaaaaaaaaaaaaaatgatgtttagttgaagaacttctattcagcaaatgatatggaaatcaatgcttgtaatttactaattagcaagaaacttattagcatctccgttcctcaggagtaaaggattgagtgtcaacctgaggacattgtgcatccaagcatggcttctgctatagagctacaggcatcatcttgaccttatgaaatctaggaaagacttgtaccttagatctacatgtataacctcagtatctcctttgttaatgagagaattcccaggtaaccacaggcataaatattatctgatttgcatatttttctcagtgaggtgacaaaataccctataaggtgtgaatttttgggggaaaggatttattttggctcacagctgtccatagagtccatcatgtcagaaaggtcatgaaggcagtttacacagtcagaaaacaaaaggagatgagtgcctattcttggctagctttattcttttatactatccaggacctcaggtcaagaaatgttcccacattacttcagagtaggtattccatttgattaattgaattcaaacaaatccttcacagaagttatcctgatggattgctaggtgatccacaaacagtactgttcatgatacactcttgagtttttgagtattctatgaccagaattaattgcttagggaacaataatgacatactagattttctaagatttgtgagaagtcataactttttgtgtcatactgtgtgtcccttcaatctaatactactaattcctgatggcttagttcacctgtttatttgtcccaaagataaactcccacaaaattgcagaaggactagacaagtaatgtctgtctctgccctttttaaatgttgtacagctatcagaaaagagaattcaagcaaaattctgcccgttatgtgaatgcagttcatagaaaggcacagttgaattaattaattttggcaaagatggaaaaagcatgaggatcctcagaggtatggaagcatagtacatttgggagtagaggaccaagattgatttaccttctgatcttccagatttgagcatttatttctcagttactagaacaaactattttaatcctgcctgaatttttggaacatgagtgtttggtatgcttcttttgatacttgaagattaacatgtttacattaatactcttaaatgtaccaactattttcctgtcaagataaatgtcttatttagagttttattcctgtgaataaacacaaggcaagtctcataaagaacatttaattgaggctggtttacaggctcagaggttcagtccattatcatcaaggcaggaagatggcagtagccaggctggcatgatacagaaggagctgagagttctacattttcatcttaagtctgcttccagaacactggctcctatgcagcaagattgagggccttaaatcccacacccaaagtgacacacccactccaagatcccacttactccaacagggccacaccttctaatagtgccattgcatgggccaagcatatacaaacaataagaataagcatttctgcaatttgtttacacttgaaaggaatctctttaatctcttttgctcatatatacacatgtgaagggcctagctcctactccctccatcacatctttccttccttcatccccagatctgtaaattttcctttgaaagtattatattttcttgggctaatattttgtctttgtaaatgtatcatgacaggtccatggtctacagcatcagccaagtcagagattgaagtatttttatctttatgcagatataagggagtttaaaggacacatataccatttacattgttttgaagttttctttcactgttgtaaagaggaatggccatgcagtttgagagatgaaagccttagaacagctaagtctaatgactattttaatttcctgatatggtacaatatccaaaaagacattgattattctacctttgcaaattttattaatataaccatatataagacttagttctatactcgctttagttctctaataattcccctaaaggtaagatgatctccagagataaacaggaccactgcttcttctgtgttgcaagctcaggtgtttcttctcagtgtctaaagttctagttcacctgagcaggtaaatcagctccgaaaagattgttaatgttgaagttggtttatactcttttctttattgtggtttccacaacaatcattaagcacatgtaatacacctgtgtttgagtataagcgtgagaataattatgccattgttctggaaatgtactatgagatatctttaaattctgtgttctcatgtattgtaggaaatattagactgtcatactgtccataattatgcctacgcataatgtgtatatcatgtggaaatgactatgtattatcactaatgaaatatagttattgatctagcaacacattcaaatattaatctgtatatgtaaaaatcatccaaatggttactgtcatttggtaagggttccctgcaatggccaataagtacactcacaatcatgtccttctctactcttccactccaactcccattccaacacattggattcccgaccacagtgtcctgcttactttctgaccactaccctttaccagcttgtccattcacaatacatgacttactgctacattcccccacttcaatcctcatggagtcaagtataattttctggtatgtctctcttggaaaacttcatgtagagtcttatactgctttgtcctctaaactctgcatctgttctctaagtatacctttcattgatgtgaattcaaatctttcagattcaactaacatcagactaaaggtagaaataaacaatcaaaaaccaatcatcgtttacagaacatctatagatttttccagtcataattttatctatgaaaaccagttttcaatatttctgacttatttaaaagtttatgagtctatgagaaggtgggtggggattaggacagaaccacaccttagaaagaaaggcttgatagccaggaccttgagcgtagctctgcctctacttaccatgtgactttgaataaattctttcatttcagctcttcatgatcactcttcagaattttttttaagttttagtatattttctaataaaaatttaatgcaaatagaataattttagtctagtcctcacatacgtcttttctaagcctgtggaatgctctagagagccttggctgtttcagtttaagtgacctcatcaaagagacatttatcatctatatgaagtagcagtgtcattaatcttttctatttccccttctcgatcttggtttcacttatgctgaataagctggaaagggaacagtgaacaacactatggaaatgttcattcctgatgtggctgactagctcttaatcacactattaagtatattctctgatttaatcatgctagctgacaagcagtaagatcaagactgatgttgataaatgtctgtcattatcttgtgatatggatgaggatgatttttctctaaatgttaggggcttgttgttgttgttgttctttcagaaatgataggctatcttaaaagggcttgtaaaacatctttgtgtgtgtgtgccttgtgtgcatgcatgtacatgttcgtgaatgtccacctgtatgtggggagagaagttgatgttgactgtgttacttagccactcctctccctatttactttttttcaatgggatctgacattgatcccagagtttcccaactcagtcaggctgccaggtgtgcacagccttctgactctgatggtttactgttgggattacagacatactacctgtcctggctatttatttttattttttttagtttctttaattagaaaaaatttcttttttttcccnnnnnnnnnnnnnnnnnnnnnnnnnnnnnnnnnnnnnnnnnnnnnnnnnnnnnnnnnnnnnnnnnnnnnnnnnnnnnnnnnnnnnnnnnnnnnnnnnnnnnnnnnnnnnnnnnnnnnnnnnnnnnnnnnnnnnnnnnnnnnnnnnnnnnnnnnnnnnnnnnnnnnnnnnnnnnnnnnnnnnnnnnnnnnnnnnnnnnnnnnnnnnnnnnnnnnnnnnnnnnnnnnnnnnnnnnnnnnnnnnnnnnnnnnnnnnnnnnnnnnnnnnnnnnnnnnnnnnnnnnnnnnnnnnnnnnnnnnnnnnnnnnnnnnnnnnnnnnnnnnnnnnnnnnnnnnnnnnnnnnnnnnnnnnnnnnnnnnnnnnnnnnnnnnnnnnnnnnnnnnnnnnnnnnnnnnnnnnnnnnnnnnnnnnnnnnnnnnnnnnnnnnnnnnnnnnnnnnnnnnnnnnnnnnnnnnnnnctttttaatagctgagtagtactccattgtgtagatgtacaacattttctgtatccattcctctgttgaggggcatctgggttctttccagcttctggctattataattaaggctgctatgaacatagtggagcatgtgtccttcttaccagttggggcatcttctggatatatgcccaggagaggtattgctggatcctccggtagtactatgtccaattttctgaggaaccgccagactgttttccagagtggttgtacaagcctgcaatcccaccaacaatggaggagtgttcctctttctccacatccacgccagcatctgctgtcacctgaatttttgatcttagccattctgactggtgtgaggtggaatctcagggttgttttgatttgcatttccctgatgattaaggatgttgaacattttttcaggtgcttctctgccattcggtattcctcaggttagaattctttgttcagttctgagccccattttttaatggggttattcgattttctgaagtccaccttcttgtgttctttatatatgttggatattagtcccctatctgatttaggataggtaaagatcctttcccaatctgttgatggtctttttgtcttattgacggtgtcttttgccttgcagaaactttggagtttcattaggtcacatttgttaattctcgatcttacagcacaagccattgctgttctgttcaggaatttttcccctgtgcccatatcttcaaggcttttccccactttctcctctataagtttcagtgtctctggttttatgtgaagttccttgatccacttagatatgaccttagtacaaggagataagtatggatcgattcgcattcttctacatgataacaaccagttgtgccagcaccaattgttgaaatgctgtcctggcctttaatggacaagtcctgatgattcttcaacaaagtgcctttgttgacagagccatagctatatcctattgagtgccatcttttctcttacacccacacttagcagtcctgcattttgatcacatagtgaagtaatcacttgacctcagaacttcagtggtctcaatattctcccttactttctacacccgtgccctccagctatagtcagtaccagatgatacttagtgcctgtggagtcctcttactgctaaagacagtgaagtaggcaagatcccttttgcttggggtccttacccacataagtactttttgcatcaggtcagtgtttgttgaagtcaacaggtagcctttagcaaatgccactgtttccatgagactttctttaatgatccttgggcaaaagtcagtgtctagctctgcgttgtatttggatgcatatatcgctcatattatttatgttacacatatcagaaaaacatgttcactcttcttcctctggatgttaggaggcaccataagaacactgatacatcataccatgaccttcgcaaaacatagacctgagaaaatgttaacatgatgattacgtatgtttttacattcttttatgaattattctttatatttaattatgattaatatctggcatatacaaatacacacatatacaaagagagacagacagacaggcatacagagtgacagagaggactgggttttggaagctttatgtggtgaagtcctatagtcagaagtaagttactgtaggcaggtcttgaatattgataactcatactcacttcctgttcactcccttcttccctagtatggattttttaaagcactgtgaccatttaccccctgctcaagccaacatgtcttctctgtcatgacggacttcaggactactaattaaaataacctgttgtacattaagttgactttgtcagagatttattattatgattttaatcacagcaacaagaaaggatctaaacgttttgtttattcatgcccattgtaaaatttgtgggaaggagtacagtgtttacaaggttataagtgattagtcatgaggagagtttcttcaacattctcagaatagcttctaccaaaggagctaaaggggtctgcaaccctataggtgaaacagcaataggaactaaccagtacccccaaaagctcatgtctctagctgcatatgtagcagaagatggcctagtcagccatcattgggaagagaggccccttggtcttgcaaactttatatgctctagtacaggggaatgccagggccaagaaatgggagtgggtgggaaggggagctcggcagggggagagtataggggaatttggggatagcatttgaaacgtaaatgaagaaaatatctaataataaatttaaaaaaagacaccaagaagaaaaagaaaaagaatagcttctgagtgaacacatcaacagcagccattaaactcagatgtgaagagctggggctagaacatacttggaattgtgcttgtctaggctgcatgaagccctaggttatatcccaagcatggcatataccggacatagtaatgaacacctttatttctggtactatatcaatggagacagaagtatcagaagaccctgatcatctttgcttacatagtgagtttgaggatgcctgtgatttttaagatcctttcttatgaaaagaagtctcagagttgacccagcaccatcattgttaaggaaaatagtcatatgatttgaagaaaacatcaagcatcatatttgacaggcatggtatgtcttaatacaagggttaatggcagaaaataggactggattgaaagtcagatagtttgctctttcttttggcatcttgagttaaccaaaatataaagctgtgagactgtaccacatcaaaacagtaattcttgtacctaagtctccagaaataccatggatgaggaacaggaaagattgtaagagctagaggatcaggatgtcagctgtgaaactctcttaaaacgacagagaagcaacatgaatgatccattaagaataaaactgctcaaagatgaataatgatagttatacagtatacatgctaatatagaacaaggaactctgataggagccaactcctagaaaaacaagtacagtatctagtgatactaagagaggaagagttagtctttttcaggaatgacctcactaattgactttccattagcaaatgttcatccctgaaatcatatgcaaagaagcaacaataaatgtacttagaatgttgcacttatatatttatgcatatatgtttaataaagtcatgtaaatggaggaattggtacaatggcacattggaaaatgaattgaggcgatgatgtaattatattttaattcaaattaaaaatagagaaaatgtgagacaaaacaaaagaaaatgagttgaagcagtaataatggtggcaggatcaattcagcataacagcatctctgctttcccagggctttctagatccttgctgatattgcttggaaggtcacctgaatgcttctggacccagatgcagctgaactctcccggcttctatgtttaagtcactgataggctgagtgtttactgttttttaaactgtaacaattcaaaattcaagaagattctccaatttgaatccaattgattaaatcataattgtgcaaatagggtgctccatgacttcacctggatttcttatatcagaaaaacaataattgatacatatgtcaataaattaggctcatacataatttttgtacaaagttgattatgttttcgagagggagatatggcaccatgggttaagtgcttgttttgcaattatgaggacctgcgttaaatccctggaacgcatatcaataaaatatataaataaaaactcaaaagtagtcacataaatgctgagcatgctcatcagtatctgcagtcctggttttgggactagatacattaggattccaagaccctcctatgcaacttgtctagctgaattgacatattctgggttcaaggagagggcctgtctgaaaaaaaatgatgtggtgcatggtttagaaagacactgggtcaggcagtggtgtgcatgcctttaatctcagcacttgggaggcagaggcaggaggatttctgagttccaggccagcctagtctacagagtgagttcaaggacagcctgatgggtaaaagatgtgctagtgggatgaaggtagacttttccagctcttctcaggaatttacatcccaaaataattatgcattttgcaaaatccttcccccatttgtctcttgttttatagaattagacttctaaatgtcttttctctgcctgtttgcctcaaagacttctgggagacttagatgagtgaacaactcagagaaagtgggtgctttgtatatgtaaataaagagtgtataaaaaataagaatttccctgtataacaaaatattacttgggtaaaagtaccgcatactggcacttacacaccatattttctaatgcttcgggattgttgtttagtttggaggcaaagatccttgttgcccatgctagcctctggcttgttatgtaggctatgacaatgttgcacttttgattctcttctccatatccctaatgctgggatttcatgcctgcacgattatacatggtttatgtttattgtgctgagaatccaaaccacagttccttgcatgctaagaaagcacccaattccaatttcaatatatgcccacttaagtttagaatcttaaatcttgaaaatcactcaaaggagccagcaatacctttttaagtgtctagcacgtgctaagcaaaaagaagacagcgattgtcaaggggaagcagtgcatgggtaccttcaactgatgctatccagnnnnnnnnnnnnnnnnnnnntgggtgctttgtatatgtaaataaagagtgtataaaaaataagaatttccctgtataacaaaatattacttgggtaaaagtaccgcatactggcacttacacaccatattttctaatgcttcgggattgttgtttagtttggaggcaaagatccttgttgcccatgctagcctctggcttgttatgtaggctatgacaatgttgcacttttgattctcttctccatatccctaatgctgggatttcatgcctgcacgattatacatggtttatgtttattgtgctgagaatccaaaccacagttccttgcatgctaagaaagcacccaattccaatttcaatatatgcccacttaagtttagaatcttaaatcttgaaaatcactcaaaggagccagcaatacctttttaagtgtctagcacgtgctaagcaaaaagaagacagcgattgtcaagggaagcagtgctgggtaccttcaactgatgctatccagggcctccatgtctgtgtttgttctatttgggatgtactacaattttgtgaatcactgctatattcaactgtggttttcacaatctttaaagacaacagaaagataataatgaaatcagaccccaaacaaattattctttttttcccccagtatctcagtgagtcataattttagaatgctttccctggctcacaagggtatcatcttcacaggctcatttcctcttaagtctaggaattatctttgagcatttcttctagtattgttgtgacaagaaaaaaaaaatcaatgaggacaaggtcagggtcccttttaagtatgcttaaattctatttaccctaaatttctacactctttactatctaccaaaaggaccacatgtttagctaatgttggcatttagtgtgttattttgtcttgaataattttgaagagacattgttttatacacacacacacacctccagagatatgtgtgtgtgtgtgtgtgtgtgtgtgtgtgttggcatttagtgtgttattttgtcttgaataattttgaagagacattgttttatacacacacacacacacacctccagagatgtgtgtgtgtgtgtgtgtgtgtgtgttgtttgtttaaaagccactttaaaatttagaaagaatttagatcataaagtaatgtttggtgattaagatgaaaaggaagcactgaaatggcacaaagatcaagaaactacacagatttttttcctagttttaactttcccttttttctattaccctgcctaaaactatatcaaatcattctattatgcattatttaaactacaaatttagcattgatgcacataaaaataatgtatacacttaaaattgtttttagctgagtcaactcaatcagtcttgcccgagctagtatctcgccggcaagaattcactcggacaactggatccttctacggcaaagcttttattgcttcaacataaggaagacccgaacctggaaaatggtgctgcttagatagcccgcagcttgacgtttcagcacctgatgtggtgtgacagcacctgattagttgtttgcccatcaccccattactacgcccgagatggacagtgactgggcgtgaatttactcttgcacttgctcctaaggcttgtttactagttaggcgcagtggaagccagcgccatcttataatggcgattgctcacagcacggctctccacaaatcagctgcagtatttggtaatctgttatcttagtggtttcatttatcagcctttaactattttttttttagttaaatctctttttatatgcaaactcgtatgtgtgcattaaatttccccctttttaatgaagggtatgtgaatgcccctttctttatattgaagtagaccatcttcgcattcaaaaagtatccaaattctattattcttctgaggtagtggttatgaaagttcagttttcatttgggctggtacaatacgcaaacatgtctattctctgaatacacatgaggcactggcccacttaaagtgactttttaaaaattatttatgaaggaaggattttttaaactgaaaagtttccttttttctattaccctgcctaaaactatatcaaatcattctattatgcattatttaaactacaaattttgcattgatgcacataaaaataatgtatacacttaaaattgtttttagctgagtcaactcaatcagctgcagtatttggtaatctgttatcaagttgagtgtctgtctttgactcttaatggtttcatttatcagcctttaactattttttttagtaaaatctctttttatatgcaaactcgtatgtgtgcattaaaatatagagaaagttggaaggcattaatgaggaaagacagaataaaatgcagaaagtttggaaaagagagttaggagggagagatgagaagagagactatatgtacacacacacacacacacacacacaactctgtgagctactctgtagcctttcagattgcattcctgtcttatgaaacatcttgtgttttagatggagccccatttgcctggtggactgggaggtccaatgagaggcacccttactggggaggttattttcctggagaccagaagtgtggatgtggcctagaggagagctgcctggagatgtaagtataaatatatggatggtttctttttcttctactcatgttctgtgccttgaccaccagttagtaactgtagcactacactaaaatgtcctaatctacttactgattttgacttaacttacaaaaaaatctttttttaattattatttaattgttttatgtagtgagtacactgttgcttttcttcagacacaccagaagagggcattagataccattacagatggttgtaagccaccatgtggttgctgggaattgaacttagaacctctggaagaacagccagtgctctcaacctctgagcaatctctacagccctacaaaaatcttgatattccataagaatatgtacattgaggttgagaaatgccaactacagaaaagttcagtggtgattttcaatgttatacatatctgtcaaatggcaagacaagaattcaaacccaactccatcataccaaagtcctagtcctcttttataccagctcagtccagcaaggggatgtttacgttctcatgtctattaggtctacatcatctccaactgccaggaaagcttttcaatttccactgtatcagttgtacacaccacagtgattgataaatactgatgttcagtttgctttctcctttgtattcagtctggaaccctagcccagaaaatagtactgctcattttaaagtggcctttatacttcaaataacccagtacggacactagattttcttaagttaacaatcaagaggcaagatcatgactaagctttatcttcaaatgtataagagatgtgtgaatattttaggtagttattttacagagaaagagaatgtgggaactaaaagggggcaatggggaaggggaggaaagagaggatagccaatgtctggccagaattcctcctatgctctcggcaggcagacaggggaggcctgctggatgccttccactatgctgtgggtgggcatctaagcaactgaccccactcaactggggtggacaaggggaagcccctgaaaccagggggccccagggtgacaccctgtgccccagggttaagagagagggcatagggagagaggtttccacacgggtgagattctgcgcatgggccttgagtccaggagatagtctatggttttagagctttaatgtagaaagaaaggcaggaggaaagatagaaggtaaaagagagagagagagagagaccacccatggccaagaggagagaaagtggaaaagaaaggagagagaagaaaagctagagagtaagagggagagagagagagagaggagaggagagtaaggggtgtaagagcaagaggagtgcgagagctaggaggggccaaacaggtccgcttaaagtgtgctgctatctttactgttgctaggtaactggggaggggtttagcctgaaggtcagaagcttggactttgcctatgtgactactagccatgcgtctcctgtgcttataatttctataggagccagggtccaggagacatgagagaactccttccatcccatgtaggtgaattttcaccactgggtcccagagttcagacctcagctctactaaagaccagactgtctgtgtattgcccaatgccccacaagagagagagagagagagagagagagagagagagagagagagagagagatcctctgatcctagacactcagattcacttttgagtttgagtcataatttcccttgttgtatctggcattaagcattatttgcaagtttataagctcaggatgaaacatcttcactttactttatgctatgctatttgagaatctgacacagaaatagaatgataaaatacaatgcagaaggtgtcattcctcaggagctatctacctttattttaagtctttgtttcttactagaaccaggaggttgtcacgtagactagtcatcttgaacattcaaaagatatgcctatatcatccttcccaactataggcatgaacttatgccaatacacctgctttttcatgcatgtctcatttatcacatgcatatactacaagtactttccttgtgagatatttatccccagatcagtgaacttgctatgtaaattctagtgagctaattttatcagttcaaaatattataaattttttaaaatcacattatccggtaaaatttgaaatacacctgtcacatgtacccaacttcagtgtctattaaagaaaagaaagtacaaagtcaaaaacgatgtacaaactgtgtatctggtttacctttttctacattcatggcgaacatagaccgaagttggctgtccacatatttcaatgtttctgtttctaagcctcatacttccactattatcttcagggttctgagtgaatgctagaatctcccggaactctttcctctaaaattccttcaatttatgctattgtagaaagttaataagaaagcaagattgtgctagtggagcagtttaatcaattatacactatagacaacgttgtcacttaaaagtgttgagatgttttagtgcttagaaaccatatatgatatttatagcccagaaatcctatcgttgatttttattaaattgttatttttagatgagttaaaagttcttcttaactctaccaaaagaactgctaatgtgattgcttatcccagagaggagtctcctagataatagagaacttatggggagaagggacatattgttctataaaactaattactcaagaatttctgttgcaatcaaaatcaaaataagtatggaaataaagaaataagtaaatcagtcttgttttctaacaacagagtattgactagggaaaatatggcatacatgcataaaaaatttttagcagtaaattattcaatttgttttgttgttcattttcttttgtaggaaattaaaggcaactgtttataggaattttagtcatattaaacaaatcacagaaagagaaaatttatatactttcatttatggatatttgtttttatatacatatatggtatatgagcatgcacatttatatcaatgtttgtttgtgtggttgtgtgatgttgcatgcataattatgagtataggtgggtgccttcctatgctcttatgtgaagaacaaagttttagaagaacaaaagttttagaacttactctctctctctgtctcacttactttctttctttctttctctttctttctctctctctctctctctctctctctctctctctctctctctctctctctttctttctttctctcttatctgtctttctttctttccacttccccttgtgcccaccccagggttttttattaaacctggaaactggcaggcccatgagatccatggatccttctgagttctagagagctagggttacagactcatgcaggcacattgcttttgatatggtttctggtgatctgagctcaaatcctcatgtgtttgtcataactattttcatctaccaaaccttctgtctcctcagcccacaagaaggagcttttctggaacagtctggtagacacctgagagtatgctagaaaacccaggggagagctgggtcacagacatggtgtaggcaaatgcttcactttgcaaggaggaaagaaagcagagttgaaggtggggagacacagtaatggttgcttcctggttgcagacaacagcatggcttgcatgttttctcaccctaataccaagtttaacaaatgagaaactcctgcacatagagcttctacctgcttctttaattgtttccaaagaaactgaggagcttctaagggtttctagttctggtcattaaatctgctgtttagttggtgcatccctttataaagttggttcctgacattttatcaatggaaaagaaaacctgtcccttgccctcgccctcgccctcaccctcaccctcgccctctcttgtttattttatttattacatttcaaatgttgtcccctttcccagtttctccacaaaacccccatcccatttccctccttctccctctatcatggtgctctcccaccaacccacccactccagacactctgccttagcaaccccctatgctgaagaattgtgctgccataggaccaaaggcctcccctcccattgatgccagataaggcagtcttctgctacatatgcagctggagacatatgccctccatctctgtgtgtgtgtatgtgtgtgtgtgtgtgtgtgtatgtgtgtgtgtgtgtgtgtgtttgtattagatattttctttatttacatttcaaatgttgtctcctttcctagtctccctctaaataccccctccccttaccctttccttcctccccctgcttatgaatccacccactctcactttctggccctggtattcccctacactggggcatagagccttcacatgaccaagggcctctccacccattgatgaccgaccaggccatcctcttctgtatatgtagctggagccatgggtcccaccatgtgaactctttggttggtggaacctaatatagttgccccctgagagactctgccagtacctgacaaatagagatgtgaatgctcaaatccatccattgaattgagcacagggtccccaatgaaggagctggagaaaggacacaaggaggtgaaggggtttacaggtccataggaggaacaacaacatgtgtattttttggttggttgtttagtcccagggagatctggaggtggtccagttagtttatattgttgttcttcctaggggattacaatcccttcagttcctttggttgatatcccattactcttccattggtgtccccatgcccagtctgatgatgggctgagagtatctgcattatacattggtcaggctctgtcagagcatctcaggggcctttctatatatatctatttatatatctgtctatatctgtatctctatctcaatctctatccataatctgtctgtctgtctgtctgtctgtctgactgactgtctatagtttattttcattatatgggtgccaggaacctgaagagctggatttcactctatccctcagagagattatttatgcaataattttgaagtaacatgacaactaatatagttctgcttgacatatatttacctctgttctttggtaggtgggttaaatacagttcagacttaactggtattgattacattgttaaccacatttctctctgatatcatcataagatttatcaagtttacaatatatgattttattgtgaattatttttcagttccatttagaaattctttcttgagctagaagggataactcagacaacagtattccccatgcatgtatgaaaacttagcttgattcccagtatccaaaagaaatgttggatacaaaagctaaaagagaaagatagaagaaagaaagaatgaaggaagaaaaaaaaagagtaatttcagcatgctataaggactggtaggcccccttttggataggtggagagaggcaggtcttggggttctgccagccagccttttcaggacacactacttttaccctcaaaagattacaggaagatataaaaagaaattaagttgcacttataaccaatgattgaatttaaagctaattttattgggtatttatttcatttacacttccaatgctatcccaaaagtccccacatggtcccccacctacttcccaacccactcactcccacttcttggccctgacattccactgtactgaggcatataaagtttgcatgaccaatgggcctctctttccactgatggccaactaggccatcttctgatacatatgcagctagaaacacaagctccggaggtggggggtggggggggtggtactggttagttcatactcttgttccacctctaagattgcagatcccttgagctccttgggtactttctatagctcctccattgggggccctgtgatccatccactagctgactgtgagcatccacttctgtgtttgctaggccccagcatagtctcacaagagacagctctatctgggtccttttggcaaaatcttgctagtatatgcaatggtgtcagcggttggaagctgattatgggatggatccctggatatggcagtctctagatggtccatccttttatctcagctccaaactttgtctctgtaactccttccatgggtgtttttttcccaattctaagaaggggcaaagtgtccacactttggtcttcattcttcttgagtttcatgtgtttatcaaattgtatcttatatcttgggtattctaagtttctgggctaatattcacttatcagtgagtacatattgtgcgagttcttttatgattgtgttacctcactcaggatgatgccctccaggtccatccatttgcctaggaatttcataaattcattccttttaatagctgagtagtactccattgtgtaaatgtaccacattttctgtatccattctgattatcttggaaacttctagatgaaatataattatttggcattctagtaataacaacattaaagggctttctgaaaatggattcaatgatgtgtctgtgccatcatttctatagttaatactctaaatatgaatagttttttatctacttctgctctataaagcatcttttctaatgtttgtaagaaacataaatgaggatgaagagataactcagctggtaaagtgcattgtgcataagaatgcagacctgagtctagtccctagaactcatgtgaaataagtcagggatgatgattcacacatgtaattctttttttttaaaaaagaacaattttattagatatattctttgcttacatttaaaatgctatcccgaaagtcccctataccatccccgtgccctactccccaactcacctactcctgcatgtaattctaatgttatattaaagaagacaggatgagacctggtaacacagagagctcaaagtttacttttgtcctctccttacatgtgcacatacattcatgagcacagatgcacccagctagtcatgaacattatacatatacatacacccaccccccccacacacccccccacacacacatgcacacacaagaaatgatgtagactgagatgtgtctgtatttgtcatttgtcatatccaaataagacaccaagtactagtgatctatgaagcttagccaatgcatcaagttccagagcatggaaaggcagtctctagaaacaaagtggaacactcctagaaatgacacccagggtttactgctatgtgtagctcactctcagatctgagtctacaagatgagccttttgtcttctctatctgctttgcaaacatcattgtagttctaggttgttatctgctacattttaaatgatacatatggttagcaattttgctgagtttgtagctttaaagtttattaaaaataaatatgcctttattataagatattcaataggaataaaaagggaacattttacatcactagcactttaaatgctcatgtgactactgcatgtgcaattgtttttaattttttgtttaatagtttaatgtacttgtatcatgaatttttatatattttcattctggtctgtcatcctttcaaactcctgctggagctcatctcagtatgatgagatcatatcagttttttcctctattgccattgatcttaattattgttgcttgctcaaacttgagtgacaggctacttcttggaatcagggcaatgcagaaaccccaaattagcctcagtgttgaggttaggataataaactgcttattgctaaaacagcccaagaaatactagacttgcgacagttccaagaaaaccaataagtgggctgctcatgctaggcagagcaaatagagaactgcccactccttgaaagaacagcaaaggtatatgaaggtcaataaggatggccaattggacagtatctggaatcaccaaggaagtaagcatgattaggtcaactgagatacaaagactactctgtatcctgggagtccagactaagtaaaaagataaggggagctgatcactagtattcacctatttgcatcctaatggccttgtgaggagttgtggtcatctcctggcaccatgataaacagtgcccttgaactgagagccaaaatcaacctttatcaaagcactaagggggcagtaactcatgaagtgaaggaacaagtagccacctctcaacaggctcactcagccatatgcagagattcctggaagcctcatcatgttgaaaattttctggagcccttgattagctggggtgaggatagatctgaagtgtgacatctgctcctcaattcccatctgatgtcatctttttcttgttcatccaaagaaaatggacaagtacatggatttttcagacaagtcaaatgactttctatttaaagtacataattattattgattatgcacaagaaaaaaagctaattctatcttctttgcacatctacaacactgatactttgattagcttatacagttgcgcctattttgttagttttgttttggctttttttttgtagaacttttatgatctgcatgctaattataaactgactaaacttttattatggagcaggataatcaaaacctatatttgtcatttgtttacttaagtatctaaatcatataggatcctgggtgcctccagtccttatttgatttttaaaaatgacaaaaggcacaatagctgtttctagagagtgctagctgagttaccaaataatataatctctatctgatatggcttatagtcagttttgacacagtataatatatatatgtatatatatatatatataacatattttattatattattattttgcatgatattataaattctttaaatcaattagagacagcatttttacatattaaatttatgtttatgaaaaatcagataaatatatatgtaaaataaaaagatgaatgctaataaataccatgccaacctaaaaactttcctccaactataaaattttgagtggagtaaagagatattgctaataatcagaaatatctaaaaagaggacttctggtaattttaccatgcagtaggtggacttgctgtgaagctttgagtgtataaaggaggaggctgtggtctcacgtagcatctgccaaggtgactttctaaggtataatcttagagagtcagtgttgaaatgactgcaaattagcaaactgatacctaatcaattcaattgtgtggagaaaacctgtttaaataggattggaatgtcagccggagtttgaacaaggacagttccactactcagtgctgttgccatgcatatagcaatgtctaaagaagatggtacctgcttggtaacgtaccagcttccacccaggggagactgctttcctccagtgagatatcagagagcatgttcacatgatgtgctaatacttggaaaatcattcttggtttcataagttggttttttgatttcacatcctctaccatgagaaatgagtattagaaatgccatttgctgaacaaagcatagatgtgaaaacagaaacgtcccacagtgcctctgtggataccatcactttcaatcagagcacaagataaaatggcaaaactaatagtttgcagggcacacaattatgattcaatatttcttagatgagatttctcaggtacatctttcttcactgctataaatcagttgtattcagcagtgtggttattaattttacacttcaactttctgtattttacaattactggaaagagagtttcaattgagggtgtcattaggttagccttatgtgggatagtcttagctgttaattgattctggaagaaccagtttactgtggaaaacattattccctgagaaggaatcctggattgattttactgtttcaaatttccatataaaagtcattcctctcagagaacagccatggcaggctccaattggggaagagaggcaacttttggaatgtaaataaataagttaataaaataaagcaatttttaaaaagttaaatttaaaaaaacatattattcctgataatgtgagttacatcttcaacccaaatatacaattttccatgttatttagaagagattttttaaaaacttagtatgttttttatatatgccaatatgctgattcaggggcatcaagtggatatagacaagatattactgtgtccaggtttagcatctccatcatacaccaagcatttgaactgacagagctatctccataggaaaacactaccaggtttttagttccaaatttaatcctctggcaccatcttcaccttgattccaaagataaatttaaatgtcaagaaaatttgattttctctattctttttgttttcctatcaaaagaaaattgagtaaaactttattaaatagctaacaagaataaagccagagccattaaccattaagatttttctaaagaacaaagcaaaaagcaaccagctaactatagaggtttactttaacacaatttaaattcaagcctgataaaaacctgtttgcaggtgatacaggagggacctctaagtaagttttgattgggatttgcgatttgtcctcaagttatttacttagatcgtagaccttcttttatagcaaagtgaagtgatgtttaatgtcacataaacacgggagtgagtatttggatcctcttggccatgatcagcactgtgatctttgtaaactacctgtgctcctgaaaacacatttagggaagatataaaaagcctgtggtgtttggatacaggccataggctacgaaattagtattccaagtattcccactggatgaaaataaaaggcctctgttatcctcctcccaactctaaccagactgcatgcaaagtgagtcccattttaaagggggggggtctttgctcagaatctctagataatctacattttaccctccccccaccctttaatttatgttttgcaggtcaaacgatactggttttctttccttcaaagatcacttgcctgtaactcagataattatcagtgataccaacagatcaaactcagaagcagcttggagaattggccccttgcgttgctatggtgaccgtgagtacattcccccaccaccatcccatttctgtgaacctttcttctgccttttcccttatcccctttctgttcagtgccctccctgtctggaaaatcacccactagcctactaatttaacataccccattgaaaacaagccagtcatgttcaaagactctttgcttcacaggacacttctggaatgctgtctcattttctactgaagctgcttacctccacattcctaccttccatgcagaattcagcgctgatatttccttcttttttaaaaccactgctttatctggcgttttcctagaaaaccttggcgttaaaaacttcctccgacttgaaatgagctgtaagtgccattatttatgagtttagtctcattggtctacagagttttactttgtctctaccaccagtctccagtacagttttttaccatcaagctaattccactggctgtcagaaaaactagccctgaagtggtcaagcatgttatgatttattgtgtcttaggacagtttgttattgtttcatcaggacatatgcattccaagagtacgcatccataggttttgcaggctgtgctttttattaagacatggtcatttcttagctgtcattttaagctgtgacactccaaccttatattctatgggaagcagggatgactactttatcaaccattttcttcatattcaaaatcattttttatcttaggtctttgatttgtttgttttgtgatctcagaacatagctcaaccagtaaatgacttttatggaagcataaagatttaccttcagttacccagaatctgagcaacatagctggtaattctcatgacaggaggcatggacaggcagagcagtgctgttcatctagcagaattagagagttctaggttctgtcagagactgtgttccaaagaatgagctaaagagtaaataaagtgcagctcttacatcaaattctggcattcatgaccaggtaataccccctacacacacacacacacacacacacacacacacacacacgcatgcatgctcagacgcatccaattccttatctcccacaaacagacgattataactagtcagtgagaattcatgctgaatctccatctctttcttaccagcagtagtgtgtgtgcaagtttagatgcatgacttataccattataagagctctgctcccatttttgacaactgtaaaataatgatcatgcagccacatgagcactaaagaaatacgaatcagatgactttctattgtgagacattgtatgtcagtgtgttaacaaaaatataagcaaataacaaaaatacaatgattaatttttatgaaannnnnnnnnnnnnnnnnnnnnnnnnnnnnnnnnnnnnnnnnnnnnnnnnnnnnnnnnnnnnnnnnnnnnnnnnnnnnnnnnnnnnnnnnnnnnnnnnnnnnnnnnnnnnnnnnnnnnnnnnnnnnnnnnnnnnnnnnnnnnnnnnnnnnnnnnnnnnnnnnnnnnnnnnnnnnnnnnnnnnnnnnnnnnnnnnnnnnnnnnnnnnnnnnnnnnnnnnnnnnnnnnnnnnnnnnnnnnnnnnnnnnnnnnnnnnnnnnnnnnnnnnnnnnnnnnnnnnnnnnnnnnnnnnnnnnnnnnnnnnnnnnnnnnnnnnnnnnnnnnnnnnnnnnnnnnnnnnnnnnnnnnnnnnnnnnnnnnnnnnnnnnnnnnnnnnnnnnnnnnnnnnnnnnnnnnnnnnnnnnnnnnnnnnnnnnnnnnnnnnnnnnnnnnnnnnnnnnnnnnnnnnnnnnnnnnnnnnnnnnnnnnnnnnnnnnnnnnnnnnnnnnnnnnnnnnnnnnnnnnnnnnnnnnnnnnnnnnnnnnnnnnnnnnnnnnnnnnnnnnnnnnnnnnnnnnnnnnnnnnnnnnnnnnnnnnnnnnnnnnnnnnnnnnnnnnnnnnnnnnnnnnnnnnnnnnnnnnnnnnnnnnnnnnnnnnnnnnnnnnnnnnnnnnnnnnnnnnnnnnnnnnnnnnnnnnnnnnnnnnnnnnnnnnnnnnnnnnnnnnnnnnnnnnnnnnnnnnnnnnnnnnnnnnnnnnnnnnnnnnnnnnnnnnnnnnnnnnnnnnnnnnnnnnnnnnnnnnnnnnnnnnnnnnnnnnnnnnnnnnnnnnnnnnnnnnnnnnnnnnnnnnnnnnnnnnnnnnnnnnnnnnnnnnnnnnnnnnnnnnnnnnnnnnnnnnnnnnnnnnnnnnnnnnnnnnnnnnnnnnnnnnnnnnnnnnnnnnnnnnnnnnnnnnnnnnnnnnnnnnnnnnnnnnnnnnnnnnnnnnnnnnnnnnnnnnnnatgcaatacccttgaaagctaagcaactattttagccaaggatattggaaatttgggagttcatgaaaaggagacaagtccatttgtagaggtttttgtgggtattcttcagcacgtaggtcagcagctaagtctttcttttgtagtttcagactgtacaggaaagacagtgtttcccatgttacgttttactttctttagagtccacagacctcagctattggtggaagaagcttttgtgattttattgtaaaataaaaatctttcatgtccaacttggtaaggctctgaaaagcagtttgaatactaaccattccatcgtgtgggaataataacttcggtgtgtgtttaattaaaaaaaaaaaaaaaatcaagccctgcagcattttcattcattaaactcaaagttaatgttatattgttttatcgaaagttactgagcaagaattgaatgttaattacagatcagtgtccaaattgtttgtactatgaagaaatgcacagttctctttgtactgtataaccttttaaattaaaattagcattaaatttaaaaccaaacaaaaattattatgtaattgtttgtatttactagcatctttctgtcaaaaatgactttcttaaacataaacatttgatattcatcttaagttgaagtctgggaatgtagttcagtagcagagtgaaggactagcatatacaagacctagagttcattttttgtcgatagacaattagtaattatatatgtaaatgtaaaatcaaaaactatagggctttatatttactaaatttattaatcctgttgttgttgttacaacttcaatgatgggaaaaagcctgaagaagatgtcaaaaccctaaacctttttagctccatatataatcatattactgacttaagcagattaactttttatgctaaagagttcatagcacgaaaccctgcagcccagctacttggaaaggaaaacacctttaacaaatgtagtgagtcagaatagatacagaccaatcccctaagagtatcaatctcagctatgcaaatcaacactttcctatgtgtgtgtgtgtgtgtgtgtgtgtgtgtgtgtctgtgtctgtgtctgtgtctgtgtctgtgtgtctgtgtatttttggacagaagaaagggtgtaaattcccactttcaacccacttcattccaggttacttccaactaaggtgtttcaattttattgccttcggtttataattcacagtgctctgaaaaaaagcagacaacacctgtgtacgtagttnnnnnnnnnnnnnnnnnnnnnnnnnnnnnnnnnnnnnnnnnnnnnnnnnnnnnnnnnnnnnnnnnnnnnnnnnnnnnnnnnnnnnnnnnnnnnnnnnnnnnnnnnnnnnnnnnnnnnnnnnnnnnnnnnnnnnnnnnnnnnnnnnnnnnnnnnnnnnnnnnnnnnnnnnnnnnnnnnnnnnnnnnnnnnnnnnnnnnnnnnnnnnnnnnnnnnnnnnnnnnnnnnnnnnnnnnnnnnnnnnnnnnnnnnnnnnnnnnnnnnnnnnnnnnnnnnnnnnnnnnnnnnnnnnnnnnnnnnnnnnnnnnnnnnnnnnnnnnnnnnnnnnnnnnnnnnnnnnnnnnnnnnnnnnnnnnnnnnnnnnnnnnnnnnnnnnnnnnnnnnnnnnnnnnnnnnnnnnnnnnnnnnnnnnnnnnnnnnnnnnnnnnnnnnnnnnnnnnnnnnnnnnnnnnnnnnnnncctccctccctccctctctccctttctccttctccctctcctacttcctctaccccctccttctctctccccctttctgttcctttattttgtgtgtataagcagtcaaatgatcatgttcagtatcattcttagaaatgccatccaccttcactgaggcagtttctcgtttgcttgctagactgactatcaatatgcttcacggatcctcttgtgtctacttccctaatgctaggactgtaaatgtatgtcctatgcctggccatttcatgtggatcctagggatcaatctcaaatactcatgcttgggaggccagtgctttcctgattaaggatctcccagagtgtgctaccaaaacaacatcaaaatagcctagattattgaatctaatataaatattttacacacatattatatgtataaatatatgtgtatgtgtattattatacacatatatatgtatatggattgatgtatatatacatatacatatatacatatatactcttcccccataaactatttgacatatttcttcatatattcattacttacttgtacattacagaattagtagatctcaaatgttcatgtgatgaataaaaactcatttttactggttcacattaggatgagaattcactggcagtggttacaatacagtgtgcagcagacacagggctcactttacctctgattaaaatcttccacaaagtgagatatgaccagtttcttccctcttcatacttcccagtatctcattcagtctaaaactagctctccccctgaatggaaattccttcttatgtgttatctaaatggtcttgctgatatgcagctcacctgagcactttcttctcagtaactatgacccagaagaaaagcatgcatggttcatgccaattccatgtctaccagaggaaggaactagatcccactaagaccttagaaaaaagtaaaaagcagtattttctcacatcaactcagagtattgtcagaaatggatcatcatggaaaacaaaaataattcttctgaggcaccaacttgttctgttgctgttgaagtgagtgatttatcaaaaataaataaataaaaataaataaataaaataaataaaaatggcctgaatcaggcaggtggctcagtgggtgaaataacttgacttcaaatattattttattattagccatgttgaatactgggaatacatgtaatagaagaactctaatgtaaatttttttctttcaataactaatttttaaattcatattacattccaatcacagtctcctctctcctgtcctccccaccctgctcttacaaatccctctctgagacatctagtcccagcaggactaagagtttcctttctaattgagatccaaccaggaagtccagtaggggaaggggaaccaatggcagtcaatagagtatcagagacagcccccactccattatttaggggactaacaggaagactaagttgcatatctggtacaaatatggcggattctaggttcagtgcctgcatgatttctggttagtggttcagtctctgtgagccctcatgggcccacgatagttgactctacagatgttcttgtgatgtctttgacccctctggttggctcagttttctcccctactctgccacaagactcaggaaatctgactaatgtttggctatggctctctgcatctgtttccattcagtgctagatgaagcatctcaaatgatattatgctaggttctgtctgtaagcatagcatagtaccattaattgtatcagagatcagttctcttaaatgggttgggtttcagattgggccagttgttgttcagcccttccctcagtctatactccatcattttccctgcacattttttagggaggacaaattttgggttgatggttttatggataggttaatgccacactccttccattgtcgactctggttacaggaagtggctacttcattctttatatacccagctggtaatagtttcagcaagactctttacttttattcagctataaagctgaatagtattccattgcatatatgtatcacagtttcatcatcagttcttcagttgagtaacatttaggttgtttgcagtttctggatattatgaataaagctgttatttatatagttgtccctgtagtatagtggggtatattttgagtatattccccagagtggtatagctgggtcttgaagtagaacaattcccaatttactgagaaactgacaaattgatttctaaagaggttgtataagcgtgcattctcaccagcaacgggggagtgtttccttttttccacatccttgccagcatgtgctattacctgagtaaaatggaatttcatagttcatttgttttgcattttgctaaagactatgaatgttcaagtgttctttagacccttcttgaccatttaagattcttctgctgagagtttctctttgactttgtaccccatttttgatagggttattttgtttgttgttgtctaattccttgagttctttatatattttggatattagtcctctgtcagatgtagggctaatcaagaccatttctcatgctctaggctgccttattgatgctgtccttagcattgcacacatttttcattttaatgagagcccatttattcattgttgatctaagtatctgaactcttggtgttcttttcatgaactagtttcccattccaatgagttcaatgtagtttcctttctgttagatttagtgtgtcttgttttatgttgaggtgtttgattcacttgaattgagttttatgcaggatggtacttatgaatctatttacattcttcaacctgcagacatccagttagatcagcagaaggtgtttcattttccactgtatagctttgccttctttctcaacattaagtgtccatcattgtgtggggttatttctggatttctattctacttcattaatcaagctgtttgtttatatgccaaaatcaaggtctttttattacaattattctatattactggatatatctgaaaataagggctggtgataccttcaaaaattcttttattgtacaggaaagttttagctttcctatgtttacagtttttccaaataaactagagaatttctttatcaagatctgtaaggaaatttttagaattttgatgggatttacagtgaatctgtagattccttttagaaattcatttttagtatattaatctgaatcattaatgggcaggggagcttttttcaggtgctgatatattctttagtttctttctttagagatttctttagaagttctggtcatacaggccttttactttcttgcttggatttacaccatgtcattttatgttatttgtgtctattgtaaagaattttgtttcattaatcccattctcagcacattgaaattgttctgaagttctctttcttagttgagtttctttgtgtggtttgggtatcagggatattgtagcctaatagagtaaggcagtgttccttctatttctatttcctggaataatttgaagagtgttagtattcgatcttcttgaaagtctggtagaattctgcacacacacacacacacagacacacacagacacacacacacacacacacacacacacacacacacacacacaccatctggccctggcttttttaagttaggggaattttaatcatggctatatatttatttatttatggtcataggaatatttaagtagtttacctgatcatgatttagcttagtaagtggtatttgtctagaaaatcatctattttgttaagatttttgaattttgtagagtataggctttgaagtaagacctaatgattctttgactttcctcaatgtctgcttttatacgtccctttacatttctttttctttattctgtatttttatcttttagttaatttggctaagggtttgtctatattattgatttttagaataaacaatacttgggtttgttgattctttgtattgttctccttatttctagttgattgatctcatcactgaatttgattgtcttttgccctctatcactttttagtgtgtctttttccctcctcctcctagagctttcaagtgtagttttaaatttgtaatatgagaattctcaaatttctttctggaggcacttattactgtgaagtttcctgttagcactgcttccatcatttcccattattttaggtacattgtaccttcattttcattgaattctagaaagtctctgaattctttctttattacttctctgacacagtaatcattgagtagaatgtttttaagtttcaatgagtttgtaggaattctgcttttgtttgtttgtttgtttaattccagctttaatccatggctgtctgataagatacaggagttattgtatctttggaggcttgctttttgatggactatatggtcagttttggagaaggtaccatgaagtgctgagaagaaagtatttgtgtgtgtgtgtgtgtgtgtgtgtgtgtgtgtgtgtgtgtgtgtgtgtgtgcgtgtatgtctttaggtgaaatattctgtagataggtccatttgactcatactatcacttagtgccattatttctctgtttaatttctgtttcatattatatccattggtgagagtggggtgttgaagtcttctactactgatgtatgggttttgacatgtgatttaagatttaataataattcttttatcatggttgtcgttacattttgggcataaatttccagaatttagatgccatctttccatgttagagatgcttcactaatcccatgtatacaataaatcacaggaaaatcatggtagaccaaggaactcagagcttcagacaagcacagatacccaaggtccctgctgtattgaacaatttggaagtactgaagtaggaagggcaaagaatacatgcttccttagtctttagagtttgataatgctaatagtgatccagtgctacaggagctcagaaatggccttttcacatttatatatatataacatattatctctttcactaaacactaagatcatgattttgcctgtaacacaccatcgatattttttatcattttttttttcgcagctccttctgaagtcatattcgccattgatgttgggaatggtcctatggaactccttgtccagtctccttatcctctgaatgacaaccaatggcattacatccaggctgagagaaacatcaaggagaccttattacatgtagacaaccttccgaagagtatgaggatggcctcagaggaaggccattttctgcttcagctgaatagccagttgtttgtaggtatgagacagcatagattatacttcatgctaaatgcttacaaaatgactctgtccttttctcaaagaaaattcctacagttttacaactagaaaacaacaaaaatagtattatttaataaccatacatttaattttataaattatattctagcatcatggtcatccaatactttgtgttactctttcacaaatttagggtacttcatgctgttttggtactgtttcttcttgttgtgtttgttgttttcagacatctatggaattttatgttttggatcattataacagttacagtgtaggcagagatttcccagatcatcacacttcttagtggcccttgactcctgataatgattgttaacaatgtgctcaaagagtttgactaaaacaattaatttcagtgttcagtagtaaacattgggctgtgtgctggcttggttctttgtcatcctaacccaaattagagtcacttaaaagagggattctcaattgaaaaataatgtctccatatatttgtactataagtaaaattgtagagcattttcttaattagttattaatgttagggtattacaggtatgcacaaccttgaattggaggaatactgggattgcacatgttcagcatcatgcctcatatatgcagtacttgtgatcaaacccagagcttcatgttgaggaggcaaatattatgttaaatgagctagatccctagttttgctgttcctgtaaaattcaagcatattttgttattctgtggaaatgcattgctgagtaagggctgtcttgatttttcccagagagacaacctgatctttgagctgctcattctctcagtgagcactagtaccaatatattctctgaaaatgtggccactgatagtaatgggaattgatagatgcagaaatcatggtctgaatttgtcttctcctttatttctctacctcttcttctcttcttcctccctaatttcctccatgaatagccatggagaaagtaattctattcaggcatttgatagtaggggtggaaatatgtcactgcttttcatggtaataatgtgtatgtgtgagtgtgtacttcatgtatatgcatgtttatgagactgtgtgtgtgactggagaatattttagatactttaatccaagtctcataataaggtcaatctttgcactgtaatttagaaaacaagaataataaaaaaaaagtattacagagctgttaaatcaaagctatgaataaaagttagggatttgcatgttgatagagcataattctgtaaaggctaaaggtgtgtgcttctgtgtaaaacttgaagttggatgctttgacagaggagtaagtaaattacagaataactattctacatatctctctctacctttattttttaccaacactcgcactttttacctcaccatgagccatgcaacactatttccattttatgtacattgcttattcattccctctatatttgagatactgtaatttttgaatctgcagacattatcactgaaaacatatttgccaaatgaaaggagatactagaatataaggatatcatatttttaattcatcatctaacatacatgtgtctttattatctgtgtttagaatataaaaacatcatatttttaattcatcatccaatatatgtgtatcttcattatcctgcgttttatatgtctagtagaaattaagattgactgattttaaacatgcttatgattatgggttcttgagtcactcctgtaagcattatgaattctactgggaaaaaattaaatttatttgcttccttagtctatttaannnnnnnnnnnnnnnnnnnntggtagaccaaggaactcagagcttcagacaagcacagatacccaaggtccctgctgtattgaacaatttggaagtactgaagtaggaagggcaaagaatacatgcttccttagtctttagagtttgataatgctaatagtgatccagtgctacaggagctcagaaatggccttttcacatttatatatatatataacatattatctctttcactaaacactaagatcatgattttgcctgtaacacaccatcgatattttttatcatttttttttttcgcagctccttctgaagtcatattcgccattgatgttgggaatggtcctatggaactccttgtccagtctccttatcctctgaatgacaaccaatggcattacatccaggctgagagaaacatcaaggagaccttattacatgtagacaaccttccgaagagtatgaggatggcctcagaggaaggccattttctgcttcagctgaatagccagttgtttgtaggtatgagacagcatagattatacttcatgctaaatgcttacaaaatgactctgtccttttctcaaagaaaattcctacagttttacaactagaaaacaacaaaaatagtattatttaataaccatacatttaattttataaattatattctagcatcatggtcatcatggttgatagagcataattctgtaaaggctaaaggtgtgtgcttctgtgtaaaacttgaagttggatgctttgacagaggagtaagtaaattacagaataactattctacatatctttctctacctttattttttaccaacactcgcactttttacctcaccatgagccatgcaacactatttccattttatgtacattgcttattcattccctctatatttgagatactgtaatttttgaatctgcagacattatcactgaaaacatatttgccaaatgaaaggagatactagaatataaggatatcatatttttaattcatcatctaacatacatgtgtctttattatctgtgtttagaatataaaaacatcatatttttaattcatcatccaatatatgtgtatcttcattatctgcgttttatatgtctagtagaaattaagattgactgattttaaacatgcttatgattatgggttcttgagtcactcctgtaagcattatgaattctactggaaaaaattaaatttatttgcttccttagtctatttaaacatcatattttattttttgtagaaagtctactagtcatcagaatttagtatcttctttatggtggaatcagttcaagtattttgcaaatttaataaattatactccatgtaaaactctaatttattgtcagtcagtatttatgaatctttctggctaaagcagaatctaaaggacttgttttctacatgctcatggctacccctctattacaagaacattgctaacataaacattgtgcgagttaaaagtgaagagagtggtttgtttcaatttttttattatatattttctttatttacatttcaactgctatctcctctccttgtttcctctccaaaaacccactatcctctcctcttcctcctgctcaccatcccatccactcctgcttcctggtcatggcattcccctatactggaccattgagccttctcaggaccaaggacctctcttcccattgataattgacaaggccatcctctgctacaaaatgtgactggagccatgggtccctccatgtgtgctctgtagcttcatcttgtagactttgctacctagcctgtgggcttctggaaatttgcctgtctaccatcactagaattagaggcatgcaccacataacctaagtttttcattggttctgaggattaaacttgggtccttatgcttgcaaggcgccaaggaccagcctcagtttagggaagggttcctgaagaggggtgtttggaatatgtggaagaaatgattcaaagtcatgtgtgggtacaagatgacagctctgtgttctgctcttgttggctctccatacagttcttgaagtccaaagcccagtcttttatttacatatcagttcaatcattaccccaggttccatttcaattatcccacgaatcagaattttataacctttcattcatagaaagattcagcaagtgcattttcttaaatagagaaaatgaattcagagatctgcctaccattgtaagcacaaattcatctgggtgggatcccatcctgagattaccattcccagtatccttgactatagcacacatacttatgtgaacacaacaaagaaaagagtttcaatgcttgatggggaatattggagccccttatgaccccctacagatgttgtttcatctgagattcatatcacagctcaagtataaataggggtgagaaattttatctgctaaatagtattttatagataaactctgggatcaataatgctcaatgaacctactatttcctggaagtaggccatggctcaagagaaggccaagtaaacagcagtaactaaacactgtactgcatgatgtgctgtaagctttactataaacacatggaataatagaaggaatggcttataggccacttaaaatccatattttattcatgtatagagaccatgcttatgtaacgtttaattcttaagcattttaacaacagctgtttcctctctcagtctttccttttctcaaggaagtttttctttgaaacagggcctcaagtcactcaagctggccttcaacatggtatatagtaaagataaccttcaatttctgatcatcctgatttcacatcctgagtgctgaaattattgatgtgtactggcacacatactttattcagtggtacaggaaattgaactcaggtctttttgcatgtactgtaactgattcacatccccagcactgactttcagtttctttaatttctgctctcattgagaacttaaccaaaattttagcagagctcacaatagcaatgcagctaagtgttactacaaagatgttacttttatgtaataaattacaagtcaacagaaggaagctgagatgaaattgccctttgacttagctatcttggggggagtaaaagcatcctgatcataaaatcctgaccggcccacaaatgagcaccaggagctcccgggttcaaagaacaaaaaggaaaattttgttcttatatattttcaaggagacaaggataagtcctacaaaaaatgccttattctacattctagacattattagcagctagatttaactcaagtctatattatgtcatggcagtaggataggggcagcccttgtttgcatctacaaaggaaacaggaagagctgtgaccacagcagactctcattctgacaagggagagaatccatagcaggatatggcctggtttctgggagagggggcagctagtgatttgtgatctatcagttatacctatataatacagatatgatacctgccatgttttccaactcatttttcaccattaggggggacatcatcaagacagaaaggctttcttggatgcatccgttcattacacttgaatgggcagaaagtagacctggaagagagggcaaagatcacatctggagtcagacctggctgtgcaggtcactgcaacagctatggaaggaactgccaaaatgggggcaagtgtgtggagaagcatattggctacacctgtgactgtaccaactcaccatatgaaggacctttctgcaagaaaggtaagagaaacatacatgccactactatgtttagtcttaaagcatctaaatgtgttggtcaatgtttctatgcccttaggcaatccacaccattgctaccaaaggcaatgctctactacccatgtaccatgtttaaattaatggtatctatgcattcaggcaatctatatcgtttatccatgtgtggtaatgtagtaccgacatggtattgtcaagccaatgttcttcacacattcaatcgtacccaacctttgtgctcttagaaaggttccctgtctttagacactgattagctcatcaacataatcatatccattctttcagtttgtgtacttgcgggcagtgaagttgtgactaataataattaaaaatgggcatatcagccaggatgacggatcaggtgatggttggaagtggattatctgtttgtgtttagtgatacgctaacatttttagttccagtacttcaattaaaagcatatcaaaggggctggtgagatggctcagtgggtaagagcacccgactgctcttctgaaggtccagagttcaaatcccagcaaccacatggtggctcacaaacatctgtaacaagatctgactccctcttctggagtatctgaagatagctacaatgtacttacatgtaataaataaataaaaaatttttaaaaagcatatcaaaggaccatggtttttaatacaaaagaaggtatagaaacacttaacctattttttttttaatgattggcttcttaatgtaaacgtggctggttaaatgctttaagtcttctaagacctgtttgagaagtgtgtttggtgtggttattgcatgcttaaattgacgatagtgggtggggtgggtggggatggaagaatgggagggcaggacaggcagctgtagacactttggccttgtaaatatgtctgccttggctaacattcatttcaacacggggctgtctacaccatttgacaaaaaataaatttcagagtttttattgtgtaaaaagaaaaaaaaagtatgtgtcctagttcctgttgcttttacactcttaaaaatttgcaactcctatcccacccactttcaagacactcttctccttttgtatctcaatttgcctagcctgaaactctcctataatggaaccctaacacaagttgcctcattgtattgtctttttttcattatataatgttgtcacttcacccattaaataataatgtcactttttttctattgtctgagcatttttctagatattctctactttgcttgagtatttgtcttctgatgttatgaataagactaccactgaaattcatgggtatttttgcaaataatacatgctttgatttttaattattttatcacatttattcatttggccacgtgactgttgggttacatatatatcatgtgatcctgtaagaccccaattctcagttagtggtacttactttgagatgcccccgagttagacagatctatgcaaaagtaagaggtgtattatctggagcatcagggtcaatctttaatcagtccctcaaagcaagtgatgagaaggtaacccctaaattgctattacaagcagtttttatactttttaggggcacaggttacattagcaaggttacagttcaaacttatttgctaagcatattgacctttaaatctattggctagcaagtatgacacctatttgaactctacctggaactgtctacagggtcaagggactattagtcaatacattctgagaacattttttactcaagaatattcctgtgggtggagaatgaaactttctctagccccagccccaggtaggtgtgggaagctgtattgagtttgtggggctggaaaaccccttagggtccctcaatcctttggaagacaaagaaccactttcagaaattggtttctcttccagctgtgaggacaaagtgaagaaaccttagaaatggctgcttcatggggagtgtaattttgttgattgtagatatgaaagagagagaacagagagaggcaccagaaagagtccagagcagagagaaaaggaagcagataggactggccagggctagggctatctctgctgcaggggtaggggagtggcagagaaaagtgggaaaggacagcagagagactaaaaaggaaagcaaagaagcaggggtgggctgggaagggcacttgctagttttctaatctggaatagcttaggagctaggatagtgaaggacataaaatggaccaattggtcaggatgctactgtgggctttgaaatacataacaggtacatgtatataacaggtactgaggtgcctggaagttagctttgggcttcaatgttcaacactgtgtatggcaaggacgctagcacttcctgtcaggtagaaacttgtcacacaggttcctgcacaacactacctatcagcattgctcagtccaccagacctcctcctagagtccaccttgagctgaacctagactttcattttggacaacatcggtgggcaaaccattttgggggctgcttggtattttcctgtttggatctaacatcactgtgtataactgggaattaaactcagtgacccatggacatttctgctgagtcatcttgctgctccatggttcatttcttacagaactggcaaattgtttttcaaagtgggttgcaggtttcacattcttactataaatgtctgaaaagctccactttttttgtagtctcacacacctgttagtatgtgcttgtcttatagaagacatcctactgtctgggaaacggtgccacactgttctgctgacttgctcatatctaatgactacacatgctaaacattctttgaaatccttatcattcatttccatgtcttttttttttttttgaataatgactgcatatcttaaccttttgcagatatttattctggttgatattcaattgtaattcatttgaaatatttttctgtcttctgaatgtatgtcccttatacaataaaatttgcaaatttatcctcccattgggttggttttcttctcacagtccttagtatatcatttgaaacagaaggctccttcattctgttggaggtcatttatcttttccttcttttattatttcttttactctcacagatgagaaataattgattaattcaaggaagtgaaaaagtatacctctaatttcttttaagtatttcttctttatataattttatatcttctattgaggccttgctatactttgagttaatttttgtatttcttgtaaaattgtgctcttacatgattccatttttaaaataaatttaattaaatttatttattaatttgggagtgtgtgtgtttcccagcataccagggcacatgtatggtcagaagataactttcaggagtagcttctttctttctaccatgtggactcagggattgaactcaggtcctcaggtttggttgcaagtatattaaccatctgcaccaccttggtatttttgaattgattgttttgactatgaatatccataagcctcaccactattatcagtgcatattttttttgccttcaacagtcttccattgttgactgaataactcgtgcaatcacttaaatatttctgtcactaaacttgcgagataataaatttctaaattgatgttctaatctggaaatctaaacctaagttaatcatactcattcatttatgaatattacttatatttaatatgtggaacacaacagctgttccaaaacaaacttgaggtgcctgtaccggcaggagcagggacacaggaagcctgcccaactagcagctcgggttccttctggtcagtgctggcctaccttggtttcgaacaaagtagacagcccattggtccccagaggaggtactacttccaggttctgtaacttgctcaggattttaggattacaggatcccaacaaccaaggagtttggttacaccaggatctcagggtctcagaggaagcatgactgcaaagaactctgatacacccagaatctcaggttcacaggatcctggaatcacaggatcacaaagaatactggactctgaagagttctgagtcaattgggattacaggaaggacagtctccaatcaaataaactaagggcagaaagcacatgaggaaaccagacagcaggaggcaagcataagaacagaagcaacagcaaccaaggttacatggcatcatcagaaccaaactctcccaccatagcagtcctggatacaccatcacaccagaaaagcaagatatgggtctatagtcacttcttatgatgatcatggaggaatatagaaaggaaataactaactcctttaaagaaatatagtagaacacatccaatcagctgaaagaattgaacaaaaccatccaggatctaaaaatggaagtaaaagcagtaaagatataacaaaaggagactactatggaaatagaaaccctaggaaagacgtcaggagccatcgatgcaagcttaaccaacaaaatacaagagatagaagaagaatctcaggtgcagaagataccatggaaaacattaccacaacaatgaaagaaaatgagaaatgcaaaaagatcctaacccaaaatatccaggaaatccaggacataatgaggagaccaaacctaagaataattggtatacaagagaaggaagaattccaacttaaagggccagtaagtattttcaacaatattatagacaaaaacttccccaacctaaagaaagagatgcccatgaacatacaagaagcctacagaactccaaataggttggaccagaaaacaaattcctcccatcacatagtaatcaaacaccaaatgcacaaaacaaagaatactaaaagcagtaagggaaaaaggacaaggaacatataaaggcatacctatcagaattacatctgacttctccccacagactatgaaagccagaagatcctgggcaaataccatacagaccctaagagaacacaaatgccagcccaggctactatacccaacaaaactatcagtgaccatagatgaagaaaccaaggtattccatgacaaaaccaaatttacaaaatatctttccacaaatccagcccttatagagataataatcacaaaagaacacatatgatatgtactcactaaaaactagatattagcccagtagcttagaatccttcctagattggggaagaaaatacccatggaagaagttacaaagaaaattttcagagcagagactgaaggaatgaccatccagagactgccacacttggggaaccatcccttaaaccatcaccagaccagacactaggcagatgccaactagagcctgatgacaggagcctgatacagctgtctcctgagggactttgtcagtgcctagaaaatacagaaaataatcatccttaagacagaacataaagtccccaatgaaggagctagagaaagtacccaaagagctgaatgaggtctgaagctctgtaggaggaacaccaatatgaactagccagtatccccagagctccttggaactaaaccaccaatcaaagaaaacacattgtgggacatgtggctctagctgtatatgtagattaggatggccaagtaggtcatcaatgggaggagagtccctgggtcctgtgaaggttgtatgccccagtataagggaatgccaagattggaattgggagtgcgtgggttgggaagtacaggaaggggggagggaataggggattttcagaggggaaactaggaaaggggataacctttgaaatgcaaattaagaaaatatctaataaaataagtaaataagtaaaggataagtagcagcatctacatatactacaaaatttagctttcaactgaaatatttaatattgatatattagagttaattaaaacaatctctactagtagaataagagtatcaactttttgacatttctaattataaaagtttttcagttttaatttattgttattatgaagatggaaaatcatattatacttccccatacctagtatgcttttaatgcactgtgcacaatatatacatttaaatataaacccaaagatatgacaaggattttattatgttaactagaaaattactagctcaaattgcaggtcatatttccataagggaaatacttgtatcaagcagtgataacctaacatctgcatggctataagtgtctgctttgtagttaacctaagaaaaactgacataacatgcctgataaaaaaacaaaaaaacaaaaaaacataacattctttgggaacttttcccaaaattgaaatagtggtccagatctgctagacagtatgctttaacatgtagtgttaactaggctgcactactataaatagttaacagaatttcacaccatagaaaaataacaagaacattaggaaagaaagccaaggttgttcttagtgtcatagacttagccagagaatgtcaagggaggattagaatactgcctgctcctttgggaaaaagagaaacctatcatattcctttgaagcccaggttcaatgtctcaaaaaacaaagtggagaattataagggaagaaatccagcccttagtctccaatattaacatgaacccacacctgcacatatgcacataagcacaagaatggatttgaatatctttaaatttaagaagcacattgtgtgtatgtatgtatgtgtgtgtgtttaacacccatcacacagtgctagaagcaggagaatcaatgatcaggcattacaaccacttagagtaattgacttaacatttgaaaatatgctctctcatcttctcttttgcagagatttcagcacttttttattctgggacctctgttacatacatgtttcaagaaccatacccggtgaccaagaacacaagcctctcatcttcagctatctacaaagatacagctccatccaaggaagccatcacactgagttttatgacagcacaagctcccaccctcttgctctacctcaatttctcttctcagaattttctggctattctgctctccaggaatggtaagtgttggtggcatgaagccacaagaccagccttcattatactgcagacactcacagctaggtggcttcaggctaacatttcttctagttcatctatatgaacaataattggtattctgtgccaggtccaacttgattttgaagtataaactcattaaattaatttgccgtgattgtcttgcagtaattatttattatttgttccatgctgaaatccattaagtataaaagatgataagtagatctgaatttaagaaggatgcttgcaatatgtattctgctatgtttgctgctgtgctcatcactgagggctgggagagcataaatactgtgtttatagataggcattgtccagatcttccagagaaatatgatgtgggagccacaatactatgacacagaccctcacttttcagagtgtgaatttccgttatagaaatcaattctttctactatgactaacaactgaagagtgatatttgccccttggaaatggccagacatggaacattttacttggccaaggagtactactatttcacaaatgaattttttttatctcttgccattattacaattagccataaaactcatgcattagggcattgtcccctgtcttcatatacatagaagagctcaaatgccttttgaatgctacagttcattgttatttgtgctgccttgctggtggaatcctcaataaaatagaatttgcaaattatatcttgctttccagttttcaaggtatctctgtagcacatagattgtcatgatgacattgctgattatgagcattcaataaagatgagaatcaaattttggaaatagggtatacatagtagatataagccagtaagagaaaggacagaaactatatcatagaagaaataatgataataattacatgatagttttatcacatgatatttttatcacactatgtcaggacaaaattttttaattgagccataagcaagtacactatgaaatcagaatcctaccatatgtaataattgaccaaataaatggaggaaatgcacatatatccttttagcatgatctcatacaacattctcctatgatcaaggatatgcttgtacttcacttgcaaattctgtcacaaaaataggcctctagacttttgttctattaatcctaaacacacagttgtgttaaggtggactgtgtagacagcaaaatgagctctatgaaaggtgccaatatgcaatactgtctacacttcaagtgcacttatttccataatatgccttttctgactgtgtatgtgtgtgtgtgtgtgtgtgtgtgtgtgtgacctttctttctcatggtgtattaggaaggacttaaatataaagaactatttatttaatgtgaaaggtgtaataaaaaatgaggaatgtttgggatgaaccagcctaaagtccaagaataacaatagatgctccacatgatgctgttgtagtcatttattctgagaccaaggtagaaggaaagaacagaaagtacacacaggcatgaaaggaggaagagaaagagaagaatgaggaggagaagcaggaagaagaggaagagaaggaagaggaagaaaaggaagagaagaataaaaaggaagaagtggaggagaaagatgaagaaagtgaggaagaagataaagagaaggaaaaagaggaagactgtttttttcaagcccatgagccatttaatcaccaacttatcatcagtttacaagtttgtggcccaaaacatgtcaatatatcaggcaattgaatttgccatttcagactttagagtatatgaggctgtctttgaatcactgggcgtgggcagttcaagaaggtacatataaggcgtgcaacatccaggacactcagcccactaatcttccttcttatctacatctcagtctcctgatgtatttggactatactaatggttatattgaagactgtctctgaagtctctttagggtaggtcttcacatacctacacctctgaaaatatgactgccaagaacacataaaatacagaaaaggaattactgcatctaattattctaatgagcccatactgtgtttaatgttgtttactcattgatattaatatacctactatgtcatgtctctacagttgtaaaaactgaggcatgaggacatcatagttcatgatatcacagcaagtaatgcacagataggtcccttaacctacctcagtatcatattcaggctttgtttttgtttttacttttccttgtgggagagtctcactggactcccaggtctgctggcccgccctctgagtgctgggattttggatgtacatcactactcctggctgtttccttaatcacaagggctaaatgagaagtgctaatgtgttaacctttgaaacacatacttcttttaaataattggcatttctctactagagaattattcttgaattcctccctgacaaattttctgtggtttcctttcaagatatttatgcagtccccttattagaaactttgcctgactctatagatacttacattttggaaacctgactgaattcagaaaacaaagagacgaaaagctaagatatgtagcatggcctctcagagtgactcacaggagaacatcttgatacagaaatcacttccgttcaagatgtggatcctgtcctaacagacactcacagatattttcaggttcttgtgtcctggaacaaagaattggagcatgactttttaagaaggagaaaggctttcctgagcatgataatagagcagtggattagggcaagctcaggctcaagctcaaatctctggatctatagattcacttccatttataggtcatttgcataattacctttcttttcctggggcctgattttgcagttgtgtgctatgtttaataacaggaagcctttaagggaggagtttctctgctaattaacgttttatatgctaatcttgatcccctccttcttactcctgccctttcaccatacttcctctttaagttcccccatgttgtgggtagtctatagtccaaaaatgcattatttagaatctgtgaaacttcttccatctccttatctttgaagatacaacagatggactagtcttattttcgttactgctcatactggttactggtattataaatatgagagactgtggagaccagcaaagcttgctgctgtctccacaatacaagaaaagagacaatttcataaactacctaaaatggatacagaattggagtgatgaaatttctcaagcaatctagttgttggaggagggggcaaagaatgacagaaaacccaaagattcatctacattcagtacttaggggctcacagagtctaaaccagggagccctaatgggactaacctacaccccctacagaaaagttacagttgtgtaacttgatcataacagtggcagcaggaattgtctctgattctgttgcctgccttgagattctttctccctactgggttgccttgcctagccttaatagaagaagtgcctaatcttaccacaaattgatatgccatgactggttcatctccattggagcctatccttttgctgaagagaaaaggaggaggagtgcatgtggggagattagagaagggaaggtactggcaggaggggatagaagggaaactgacatcagaatgtaaaatgaataaaatttaaaaaggaagaagaataagtttcctcattataccaatgaacaaatgcctacagtgctatgaagtcccttatcattactggtcttaatataacaattaagtgactattgactgaggaaactataatattctaaaaggtgtgagacaaaataataactggcaagcattgagtttctttgtaagtcttagattttgcaattctttatttcctccttctattgtcttccatgactatttctttctgtaaagactttatttgcagaacttaaaggattccttgaggaattacgaagaattcacagcttcagtgtggtcctagtactttcataacattaagccattgacctgcttaacagcagatcagggactaggaacattttagtggatgtaggtacactacagtgaatgtgtgtttttgagtacagagcactggcccacacctggacgtggaggcagaaggccaacattcaatgccatattagctttgtagcatgttcacgatcagactgggttaagagagaccatgcccccccccccaaaaaaaagaagaaccagttcctcgtttggaaaatagggatcttcataagttgaaataagataaggagaatgaatatgtttaccttgaaaccttctctaatcaggattcattcacacccatctcagtagaatcaacaattctgtgttagaaatcaccttaccttgttctgattttaatataaattcgggaatctgtggtaatgatgaggtggctagcttaaaaggagtcccatttgctacctcaggaggagccagaccccactttcagctctgcaggattagaagcaactgtgaaggattagaaggataaatctagcaaacactcagcaaagttttcatcttatatatttatttcacatagttaatcaggccagagctgagaagatgcctgtgagtcaaattcatgtatgtgaacattgacctgtcagtttggtttggcaggactgagattcatcattgttcttatttgatgacatcatatccagactagctcagcctaacctgctgtcacttcaaggataaacagggcctgatgcttaaatagagggaaggattgccatttctccgaagtaagctcacacacataaagacattcatagagggaaggattgtcatttcttagaagtaagcacacacacataaaaacattcatatgcatgtgtacttgcaggtgttctctctctctctctctctctctctctctctctctctctcacacacacacacacacacacacacacacacacagacacacacacacacacttgagcacatgaatgcatgcatatggaggctggaaggcaatctgagacatcattctcaggaatgctattcatttctttttcttttcttattaggtatttatttcatttacatttccaatgctatcccaaaagtcccccaaccactcccccacccactccagcttctgggtcctggtgttcccctgtactgaggcagataaagtttgcaagaccaatgggcctctctctccactgatggcctactaggccatcttctgatacatatgtagctagagacacgagctctggggggtactgggtagttcatatagttgttccaactatagggttgcagatccctttagctccttgggtactttctctagctcctccattgggggccctgtgatccatccaatagctggctgtgggcatccacttctgtgtttgctagaccccggcattgtcacactagagacagctatatctgggtcctttcagcaaaatcttgctagtgtatgcaatggtgtcagcgtttggaggctgattatgggatggatccccaggtatggcagtctctagatggtccatcctttcgtctcagctccttccatgggtgttttattcccaattctaagaagggccaacatgtccacactttggtctttgttcttcttgagtttcatgtgtttagcaaattgtatcttatatcttggctattctaagtttctgggctaatatccaattatcagtgagtacatattgtgtgagttcatttctttgagagatattctctcattggctggaagatagcatagtctggctaacctgagagcttcagtattctgtctgtctctctctcctgatgctgaggttactggtatataccaacacacctgtttatttcaatgtaagcactctatcaactaaaacattaatataattagacattttaatgaataacaattctcccttatttataatatcaaagtttttcttcaaaattgttatttgaaaaatgttcctagaaatccttctaagtgtcatgtactatgaatctatcagagacacaatagaatgtcttggcattaagactacttttctgctagaaacatatataagtacgagcttatcatggacatatggttcatatacattgagtacagttaaactatctgtcaggaaagacatagatactataaatagggaaagatgaatggagtagatccatttaccctggaaaagaaagtcacaaaatgttccacagactaacttttcaatcataagatgtaagttagcattttgttggcagacaaaattttaataaaagattttatttgtctatataatcatcacaatgctcacaaaaccatttcaattggtctatatgattttctgctggttaaaataaacaagagaaattaaaagatgcatagataaagccattactctatgctgaaatccattcaatacaacatccaaatgatgctccaggttaccttcactttgtcattgctcagctccctctggcccgagttaattgtatgcctttgcttcagcatttctcttttatcacttcttttggagctcataaatttataaggttcacagtctgaatttctgattgcctgttcttcaaaaagaactattatgacttgaggtactttgtattttgtatgtactagctcaagataaacagaggaaaacaaaacaaaacaaaacaaaacaaaaaaaccaaaccaaaacaaaacaccagggcaggaaatgccttcaaagtgcaaaacctaacaatctaacagttgccatacagggttaagttgacaatggatgttcttagtatcactgctttctctcagggaagtgctgtagggatcactgttgcatcttatcactcctgaacaccagtgtatgcttgagttcctctgaacccaaggaattctgaagcacagaagtgtagaagaatacaccaaaatgtttttcttttttttaaatctcactcaaccctgacaaaaacttcttccttaggattgctctctcttttgatagtttctaattagaatcaattaagccattgcatacatacatgaactttaaataatttctttcttctcttccataatccattttataagtatgttgcagcgatccattgtaacctttcagcagttgatatgggttttaatcaagattaggacatgtccagtattatacagttactctacagtgctaagggttagatctggtcttagaaataaagacgtgggtagaatgagatgcttacactatttatttctctttttgttgctaatgttgcaatgaacactttatgttttattttttggtcttctcctcactatctaaatatttttatgaaaaaaaaatgccactatttctcagtctagatgttgaagtcctgatttctccctattcaattaaggatagatttggagtaattagatccaatgagatcatggagtttagaagcttgatcacaaagaagacaccagaggcctctcccctctttcccaggcattgtaaggacaaaattgggaaatcagccacaacaaggaaagatgagatccctctccaggagaaaagaatacacagttccatcttgatttccagctgctggaatcaaaagacaaataactcatagacccaccaagagtttactcagtacatgatattttattttaaccaattgaataaagccaaagcaaaatgatatatatctgtacatcatagacaggaatttacaaagcatttcatgttattgatatcagtaatgatatgaattatttgcttaatattgtgttatgagaccataagtacaaaggcaaatatttgggacattagttataaagtataattaaaagaggaaatgcaaactgcccagagcttagtgtatgagcactttacaggtaggaaattgctagagtatggtgaaagaaatgtctatgggtgttttcatactaggtggctaccattacacagggagagtagttttactacacatgaatatgaaagaagaaaatttcagaatggcttttatctaacaccgtgtgaaatacaccctctaaaaacagatagtgaggtcagaagaaaggatgaaaactagtgaccagagagtgtatgtgaaggactaaaaaagaatcatatatacttctagacctttaagaccaagtcagcagatacagttaaagatgctattaactttctatgtgtttcagtcatgatgagtgttgagctcccttcctgaataaatcatcatcgaagaaaactaaaatacttagagtagaaaattttaatcatccctctaagtccctgtaaaaacaaaacaaaacaaacaaacaaacaaaaaaacaaataccaaaacaccctacaaacgaaaagaaaacaaaacaaaacaagacaaacaagcaaaaccaccagtcaaattcttatatagaaatgaagctaatgaaatatcatatatgattaactctacagataactgttgagtattgttttgtctgtgaggaataaaggcaaaatgctgctgattgtgttacttaatgggataactcattcccttacggcatttgaagactaggagtgcaaaatcaaggactagcagatagctgttttatggggggaggggattcatttgtagggttgactaccttatctacttatgcttatgtgtttttatcaaagggggatatagaagcagaagaaatagtgaagtaacagaagtacttatatgtgtgcgggggtatagatagatagatagagagagaaagagagagagagagggagagatttcctaatccttctgtgtcttttatttgaaggatgttaatcctgaaaaataaaggaacattttatatgacactgacagtattttgttactggggaaattgtactaaagtacaggctcatccatgagagaatgttctgaggaaggggtaaatgggaacagtggaagtaagaccagaagtcagcgatggatttaagctgacatctctgtaatctgttggagatagcttgcttttgcagaaaaaaaaaaaaaaaaaaaaaaaagaccagtgttttatttgctacaattgtataagctacctccttaaacctttcataacaatttaagaatttactgttatgttttatataaagaaagagaagtaaggaatatgtttgagggaggtgtggtatggtatgaggaaagggggtgcctcagtaggcccatgcagaggcatcgcttttccccaaggaaactagccacacaatggtatagtagagaatggaatgtattgatgacatggagaggagagttgagataaagtaagagagagagagagagagagagagagagagagagagagagaggaaggaggatgaggaggaggaggaggaggagaaggaggagaaaggaggagaaggaggagaaaggaggagaaggaggaggaggagaggctggccatgaacacatagaaagagggtgcaggtgaaaggtgttagaggggaaagagtgtaagggaactagtgtagaagagcaagagcaagagggtaagagagagaggagggaacaagcagcccctttgatagtgagtcagtcaaaagtagctatagccaggtatctgtggggaggagcctaggataaatgcaaacatttattccaggttcccttttgataattccatggatcagcattttatggccttagtccttgactaacataaaaatattgtcaatgccatatacaatattcccttattttacaagattagcactcttcaagaaaaaacaagagaattagaaaatctcactctttttgtctctctttgtccacacacacacacacacacacacacacacacacacacgaggaaactgaaatacattgtgccttcaaggcaaatgaaccagataccacagttattattattatcattattatcattattattattattatcattattattttaacatagcaagttcgatgtggtttgctaggcacagaacttaggatttccaagtctacacatagagactatttttatatgagaaagttagcattaagtacaaaatacaaaagtattaatacttttaataattttttggcaagttagtgagctattgtctatgctgctgtgtacaccattgaaacctattttgtaattcttagccatatcaatatattcttttacttttgtattttttctttttgatctcagcaactcaagacttattattcaaaatattaaatgatcccataaagtagaaatataattaagacatcatcttttttcttgataccagatgtatgtttggctccaacttctatttggattgcacatataactaccacctttagggagtagaatagtagaatatctggatcaaatttagttgttgataccttctgtggaagagatcaacactttaccactaatcctctatattcatatataagtatctataggagccttagttttttaactatcctttctctttcatgattcaggtttttcctctatttaccaaaacctgcaatcttccctaatatcatttcaactaagccgatttatttctatagttgcctttgtttttttcaggtctgtgaagcccatcttacaattcatattgcaccattgtattttcatagttgagaaatcctgtaaaaaaaaagaagttcttgaacttctgttgaactcatgccttcagagatctttcccacagccttaagggatgacctaaaggtcttagtatctccatattacaggatcatcagatacatcctcactacctggaatcatgctgtttctgattatcatggagacgctatgtaattttatcatgcaaacaagctctacacctaaagcaaacatcagcacttgaggaagagacccttatcatcttggctctgctcaagggctgagatcagtattataatgtcccttccatgaccaggcagatcaggtaaaattggtattcacttttgaggattttagtctcttataaaagtagtcaagaatgacctcaaaaagaacctcaaggattatttgggaatctaaatcaaaaaccccaaagcaggcaaacaaactctttacagctgcaaagaggacagagatacagaagaggaggagacagactagctgttttagctatgaatggagattggcaacatggcaaaataataaaaaagtaaggaaaatcaagatgtcagaaagagcacaaatgaggtctgactgcatctgaagaaaagaacagaagatatgaaagagggagagttagttctcagaaaggagggcagatccaccagaacctcagagcaattatggagctgcattgaggaattctgtgatagaaaagtacattaactcattgaaggaatagttattcgtcccatctctttagcttggtttaatatgaaccagtggtccttttaacatgtgactggccagctcttttgaatgatgttatggtaggtctccacacaaacggctattctattcttagtgttaataaatgatctttattatcacctcgacatgtagttatatgaatgagaagcttcaacctacatattttattgacaaagcctaaaatgtactagataatgacatagggatacataatagagaaaagaatagagaattatttagttttaaaaaaatccacaaagttatgaaccatgtttgattcatcttaatatcaccatttagcaaagcatcttagtttacagtgtatgctcaagttgaaatatgtgtttagcctgcctttactcagagaaaggatcacagaactagcaagtgttagaagtccccatagagtccaggagaagaattgtagacagacagaatggcatagccttttgaggcccacagagcctgtaaaattttaagacaaaaggagtgaagtgtcaacataaaaatataactctcatttcaaaaaggataggagatattttattctagggccagctgtgagtgatcaaagatacagaactcagtgtactgacagaacataaatctggattacctcaaattttatgttccaatgtggtttggtgaagtttatatggtaacagagaaatcatgaactgaagcccttctcatatatatttggtaaatattaggtagtatggttaaaggagatactatccaaggatactcacccttattagtggtgagagatcttgactttttaatatatcccagaagattccatttattagtaataaagatattaactgagatacaaaaatgagtttatgatagatattgagggtatgaaaaatgatctatgaaaaagtgtaaagaggtttcagaaggtaggcttttttgatgatttttttttccacagaaaaaagacttatcattgcagcaaggacttccccaacagtgttgaccccaaagaaagcaaagggttttatgtataggcatgcatacacatgaaggacactctctttacaaatataatttctatcccatggcatatgattgctaacacagtgctaggagtcagagataggaggatttctggagattaatggcaaacttgttttgattttgatgaatacaagcctcagaaagagacattgtctataaaaagaaaactttggatccagccaccttcctggccagaggacaggtgtccacctggccctggaggcatttgcttcaggatcagcgggagccattttggttccaggactccgtagaaagtagtctgcacaggtgagagtgtgaactacagaagctaacagcttctgggacaggtgagagccacagagcttctgaggcaacaccattttcgggctctgacatctggccaccttcccggccagaggagaggtgtctgtctggcctgggaggcttttgcctcaggatcagcagaagccatcttggttccaggactccacagaaagtagtctgcacaggtgagagtgtggactactgaaacaacagcttctgtgacagggcaaagcaacaaaggttctgggaaaggtcctgttttgtgccttcatcttcggccaggaggagatccaaacaacagacaactgtgcaccttccctgtaagaggagagcttgcctgcagagactgctctcaccactgaaactcagaggagagagctagtctcccaggtctgctgatagagggtaacaaaatcaccagaggaacaatctctaaacagagacaactataacaactagctccagagattaccagatggcaaaaggcaaacataagactcttactaacagaaaccaagaccactcacaaacatcagaacccagcactccctctttgcccagtccagggcaccccaacacacccaaaaagctagacccggatttaaaagcatatctcatcatgatggtagaggacatcaagaaggactttaataacacacttaaagaaatacaggagaacactgctaaagagttacaagtccttaaagaaaaacaggaaaacacaaccaaacaggtagaactccttaaagaaaaacaagaaaacacatccaaacaggtgatcgaaatgaacaaaatcatactaggcttaaaaagggaagtagacactataaagaaaaaccaaagtgaggcaacactggagatagaaaccctaggaaagaaatctggaaccatagatgcgagcatcagcaacagagtacaagagatggaagagagaatctcaggtgcagaagattccatagagaacatcggcacaacaatcaaagaaaatacaaaatgcaaaaggatcctaattaacaacatccaggaaataaaggacaaaatgagaagaccaaacctaccgataataggagttgatgagaatgaagattttcaacttaaagggccagcaaatatcttcaacaaaactatagaagaaaacttcccaaacctaaaggaaggcatgcccatgatcatacaagaagcctacagaactccaaatagactggaccagaaaagaaattcctcccgacacataataatcagaacaacaaacgcactaaatagagatagaatattaaaagcagtaagggagaaaaattgacttccaacccaaagtctcaaaaaaagacaaggaggggcacttcatactcatcaaaggtaaaatcctccaagaggaactctcagttctgaatatctatgctccaaatacaacggcagccacattcattaaagaacctttagtgaagctcaaagcacacattgcacatcacacaataatagtgggagacttcaacacaccactttcaccaaaggacaaatcatggaaacagaaactaaacagggacatagtgaaactaacagaagttatgaaacaaatggatctgacagatatctacagaacattttaacctaaaactaaaggatatattttcttctcagaatctcatggtaccgtctccaaaaatgaccacataattggtcacaaaacaagcctcaacatatacaaaaatattgaaattgtcccatgcatcctatcagatcaccatggactgatcttcaaggctgatcttcaataacaaaataaataatagaaagccaacattcatgtgaaaactgaacaacacacttctcaatgataccttgatcaaggaaggaataaagaaagaaattaaggactttttggagtctaatgaaaatgaagccacaacatacccagactcatgggacacaatgaaagcatttctaagaggaaaactcatagctctgagtgcctccaaagagaaactagagagagcacacactagcagcttgacaacacacctaacagctctagaacaaaaggaagcaaattcatccaagacgagtagacagcagcaggaaataatcaaactcaggggcgaaatcaaccaagtgaaaacaagaattattcaaagaatcaaccaatcgaggagctggttctttgagaaaatcaacaagatagataaatccttatccagactcactagagggcactggaaaagcatcctaattaacaaaatcagaaatgaaaagggagacataacaacatatcctgaagaaatccaaaacaccatcagatccttctacaaaaggctatactcaacaaaactggaaaacctggatgaaatggacaagtttctagacagataccaggtaccaaagttaaatcaagatcaggttaatgatctaaatagtcctatatcccctaaagaaatagaagcagtcattaatactctcccaaccaaaaaaagcccaggaccagatgggtttagtgcagagttctatcataccttcacagaagatctaattccagttcttcacaaactattccacaaaatagaagcagaaggtactctacccaactcattctatgaagccacaattactctaatacctaaaccacaaaaagacccaacaaagatagagaactttagaccaatttcccttatgaatatcaatgcaaaaatcctcaatacagttcttgctaaccgaatccaagaacacatcaaaataatcatccatcctgaccaagtaggtttcatcccagggatgcagggatggttcaatatatggaaatccatcaacttaatccagtatataaacaaactcaaagacaaaaaaccacatgatcatctccttagatgctgagaaagcatttgacaaaatccaacacccattcatgataaaagtcttggaaagatcaggaattcaagggccatacctaaacatgataaaagcaatctacagcaaaacagtagccaaaatcaaagtaaatggtgagaagctggaagcaatcccactaaaatcagggactagacaaggattcccacttcctccctacctattcaacattgtaattgaagtcctagccagagcaattagacaacaaaaggagattaaggggatacaaattggaaaggaagaagtcaaactatcactatttgcagatgatatgatagtatatataagtgaccctaaaaattccaccagagaactcctaagcctgataaacagcttcaatgacgtagctggatataaaattaactaaaacaagtcaatggccattctctacacaaataataaacaggctgagaaataaattaagaaacaacacccttctcaaaggtcacaaataatataaaataccttggcatgactctaactaaggaaataaaaattctgcatgataagaacttcaagtctctacagaaagaaattaaagaagatctcagaagatggaaagatctcccatgctcatggattggcaggatcaacattgtaaaaatggccatcttgccaaaagcaatctacagattcaatgcaatccccatcaaaattccaactcaatccttcaacgaatttgaaagggcaatcggcagattcatctggaataagaaaaaatctaggatagcaaaaactcttctcaaggataaaagaacctctggtggaatcaccatgcctgacctaaagctttactacagagcaattgtgataaaaactgcatggtactggtataatgacagacaagtagaccaatggaacataattgaagatccagagataaacccactctcttatggtcacttgatatttgaccagagagctaaaaccatccagtggaaaaaagacagggttttcacaaatggtgctggtacaacttgcggttatcatgtagaagaatgcgaattgacccatttctatctccttgtagtaaggtcaaatctaagtggattaaggaactccacataaaaccagagacactgaaacttatagaggagaaagtagagaaaagcctcgaagacttgggtacaggggaaaaattcctgaatagaacagcaatggcttgtgttgtaaaatcgagaattgataaatgggacctcataaaattccaaagcttctgcaaggcaaaagacaccgtcaataagacaaaaaaaccaccaacatattgagaaagaatctttacctatcccaaatcagatagggaactaatatccaatatatatatgaagaactcaagaaggtggattccagaaaatcaaataacccctttaaaaaaatggggctcagagctgaacaaagaattctcacctgagcaataccaaattgcagagaagcacctgaaaaaacgttcaacatccttaatcatcagagaaatgcaattcataacaaccctgagattccacctcacaccagtcagaatggctaagatcaaaaattcaggtgacagcagatgctggcaacgatgtggagaaagaggaacactattccatttttggtggcattgcaagcttgtacaactactctggaaatcagtctggcagttcctcagaaaattggacatagtactaccggacgatcctgcaatacctctcctgggcatatacccagaagatgttccaactggtaagaaggacacatgctccactatgttcatagcagccttatttataatagccagaagctggaaagaacccagatgcccctcaacagaggaatggatacagaaaatgtggtacatttacacaatggagtactactcagttattaaaaagaatgaatttatgaaattcctaggcaaatggatggacttggagggcatcatcctgagtgaggtaacccaatcacaaaggaactcacaatatacatactcactgagaagtggatattagcccagaaacttaggatacccaagatataagatactattagctaaaagcatgaaactcaagaagaacgaagacctatgtgtggacactttgccccttcttagaaataggaacaaaacacccatggaagcagttacagagacaaaattttaagctgtgacgaaaggatggaccatctagtgattgccatatccagggatctatcccataatcagcttccaaacactgacaccattgcatacactagcaagattttgctgaaaggacccagatatagctgtctcttgtgagactatgctggcgcctagcaaacacagaagtggatgctcatagtcagctattggatggattccatgtcacccaatggaatagctagttaaagtacccaagaagctaaagggatctgcaaccctataggtggaacaacaatatgaactaaccagtacctggaacctcttgtttttagctgcatatgtatcaaaagatgtactagttggccatcttggaaagagaggcctattggacttgcaaactttatatgccccagtacaggggaactccagggccaaagaagtggagtgggtcggtaggtcagtggggggtgggggtgtgtatgggggacttttagtatagtattggaaatgtaaacaaggaaaatacctaataaaaaatttaaaaaaagagaaagtatatggatgtgaataataaaaaagaaaaaagaaaactttaattgatatagaggaagacattcacttaagcctttcatgtagtgaaaatatatgtgtttacatacaaacatgtaaaatatctttattaacatgtgtaaataacatatacaacacctttatagagatagtagaattatgtgtattcatgagataaaatttctatactttcatttcaaagaaagccatacagtataacagaatttaataaaagagctttttatgcctgtgaagttggaagatagaatcttaaaaactgcccagataattgaacggggatgaagcgagggtgggtggttgggtgaatgagcagacaataaaagaacaataaaaattataagtttaaaacagggtcatgaggtttctaatatctagagtatttttcatgaagaaagatcaatttggaagaagatactagtaaccatgtaatactttatgaagtgaggaagatataaacatgaaatgttttattttgttttgttttgttttgtttatgtagctgaggatttagaactgtaacacacctaagcaaagtcaagaccctcaatctacaatactgataattaggaataaaactagaacaaagtttcttagtagaagcacaggtgtgttggaggtagaagaagacatatctccacaactaagtcaaaattatttccaaggtgaactttcatgggctatgcttatctatatattcacaaatgaaaaaaataaagttaagtaaagaaattagatctcttctagaaatactggtggaagtatcttaaaggaaagtccagcaagacaatatctgagaagattgcactccacctgagtctgtgtatccatccagaatgaaacatggcaataaagaattgtggagaagcactgtttctgcccccacaaagctcacatggaatgtcccaatagcatggtgaataaagtatgtcccatgcaagcaggaatcctgtggttcagatcactaaagcgcaggtaaaatgctggctatgcatggtggcttgtgtatgaaggcagatataaagcaacccagagtgaacgggttagtgacactaagaataacacttctctgtgcattttgttcagttaagataacctgcctcaatatacaagttaaataacaatgaagaaagattccttatctaaaccaagggtctctatacatgtatactcacacacacacacacacacacacacacacacacacacacacacacacacattggggtaaaaaaccctactgttcctttccaataaaaaatagcacctagagatgttggagatattggtccatagttaagagtacttgttttcctcacagaagacaggatttcaattcccagcaccttcacagcagctcacaacaaactgtatctccaatacttagagactcaacaccctctgctggcatgcccaggtagcagcacaaatgtggtatacatataaactcagacatacatattaaaacaaaacaaaacaaaacaaaacaaaacaaaacaagaaaaaaaacattctttggcaggaaatggcttgtataacaaaaacagaaatttattaatagatgttcactggtaccaattagacttccaagagcaaatctcaactgggaagctacctggcagatgagttatatttatggcagcacagtacacatacacctggaggaagctgagaaccagcctttcctttgaggtttattctgagaaaactgctggatccggaatggttgcataaaggtaagtgtgacataatttttggcctttcagcattgccaagccattgatctccatgtgtgctcatgggtgctattgcccagaagctaaatgtctgtcttttctattttactttcagtttctggtggacaagggacacactttcaatttggcctttaggcccatggaaaggatctagcaatataactgcagaggctgtaaaagcctacctaattctttgtagaaacagttccatgccagacttggccttaaatttggaattatgaggagatatttgtaccctcctgtccagtgacttctgcattaaatactggggtgaacttgagacatcaggggtagagaattaaggtgttctcaagaagaaaaggcatggatacaaaaagaatctataaaatgcaagcaatgatagatgggtttatcttataggaaaaaggcttatatatgatctacaaataaataatattagaagaagactacatgagactatgcaatcgctagaataaagaaacaaagattagagaattaaaagatgatgtataaccatataaaaatgttagtacttaactttcattttctagctacttgcagaattggagatgacaatgtgtagagagatactagagataggtagttgcttacttaaattttaaaattttgtaagaaatcattttagctgtagtagtctgtcacctttctgttcttacatgaaaatacttagtaaagactgttgtctgctgtaccaggaactgtaaaagctatacgcagctacctgtgaagaacaggctgtgtgaaaactatgagagaatgtgtttttgcttagtgtttagtttctgtttttaggaggcaggggttgaagctaatgaacttggactcagaatattcacaaaaatttgggaatttcttaaaatattattaatatgatgaaagccttgatagtgctttaatatataaaagaatgagttctggctctctggtcaggagaacgcaagagaatggaaaggaaggaggaaaaagaatgagaagcacgaagaagaaaaaaagggaaagaaaagaaggaagagtgatgagaatgataaggcaaagagagaactcttgaactgacagcttgtatccattcctgactctgagtctttatcaagtcagagctgctcctattctcccctttctcaggaccatcatcacactgaggctggaccttggcagtaaactaccttggacagcagaactactgctggagaactaataatctctcttttcctcttgatcttctgtagatgcatttattgtgtacgtacaggctgctgtgttgagtgtggctatggtcttacaaagctgacttatagccatcactttgtctcttgaatcagtacaatcatgctctacctttgcacatttcttaagcacgttaggtttatgttcctcattaaaagcaaaatggaaactgagggtttaggaaatcccatgctctcgttctgtagtgtgtaccagtgcacatatatggaggacgggaaacaaacttgactgctgtttctcagaaacccattcatcttgacttatgagacaaggtgcctcactctaccagaacttactaaatcacatagactaactgtccaattagctcaggatccataattctctgctctccatgtgttaggattataactactaacaccacatgtggtttctcatgttaatactctacaagacagtctgtcaccttagccttagaaacatctgatttcatcctgaccctactgtaaattagtcacgaaattatatgcagatcagtgaatttttctaaactatgaaggaaattatcaatgttgattctcacattgtacatgctaattatcttatccatcctgatcaggggagggatttttttagctatcagctcactagtaaggcactttatccaggcagggatcactcaggaatggcatctggtgagtgttgcataaaaagtccatgtgtttcagttattttgaaactatgagatatgcatggagacatgtatagcaacacacactgattagtgacagtacccctgggagcgaatctggagttgctttggtcctgtaagacgaacaactgtgctgtgcatgaatggaatgctaaggacctgcaaggcctggagcagaactaagaaagcatggagaccttagttccatcttgggcaacccttgtataaaaagcaggtagtgctgcatacccttgtaatcccaaaactggggaggttgactccctgggtcactaggaactcactgagcaacctgatctaattagcaaaaggaatgagatcattcccaaggtagtatttgcccaagcctttaactgtcaacttgacatagccacaattcttatgggaagagaatctcaatgaaaagagcaggttgctttgagtatttctgtgggctttgtacattgtgggctctactgttccagtcctgagaaacataagagaggagaaggctacctgaatataagtaagcaagaattcatgaataaaattcctctgctttggacagtgattatgccatttaaagttcctaccttgactttcccatagtgatggacccttatctggtattataagctgaaatagatccctttcttccctgtaccattttgttttgagagtatttcatcacaggaacaaaaatggaagtagagaagtctttaacccttgcttcattgatattttaacattgaaatattttgatataaaggaaatatttggtatccttaacagcaaatgttgattgggcagaaattccacatttccagcaagtgagaggcctatccttggctgtggcgagagccctttctttcacataataatgacttcctggtcttcttctccctcaaattcatgggatgtttgagacttggtctccagtttgctggtgaactgaaaacttctgtaattgtcttcttaaccacataccagcttgcctgacaacagtagctctcctgcaccctgagcctcaggagggcagaaaagtgttaggggaaagagagtaaggaagtaagaaagactgatttaaaaataaaatgtcataatttcagcatttattattacaattgacagccaaacacaatgcatctggtaatgaaacatcatacctatttgggatcttcccagaaccattctttttttttttaatgttttttttaattaggtattttcctcatttacatttccaatgctatcccaaaagtcccccataccctcccccccactcccctacccacccattcccactttttggccctggcgttcccctgcactggggcatataaagtttgcaagtccaatggttctgtctttccagtgatggccgaataggccatcttttgatacatatgcagctagagtcaagagctccggggtactggttagttcaaaatgttgttgcacctacagagttgcagatctctttagctccttggatactttttacagagacaaagtttgtacctgagacaaaacgatggaccatatagagattgccatatacagagatccatcccataatcagcctccaaacgatgacaccattgcatacactagcaagggtttgctgaaaggaccctgatatagctgtctcttgtgagactatgccgggggcctagcaaacacatannnnnnnnnnnnnnnnnnnngatggtatcacagggctcccagaaccattcttaaggcagctaagtttcctattctatgttgcataattttcccctaaatctcttgctgtctacaatttctgatcaagactctttgagagcaaaatccctgtatcttgttgcctatagttcccactgctcttgttgcatttgaatatttttggtctcagtgaaatgtttaagcaaagagagtccaagtcacttccaaatttctttctccagccagggctggcgtgtcattggcatgccattccaactgttaggaggaataccactactgctgtaagcttgcacgaatgatgtactttctcagagaccatagccataaagtttgatagcaatacatatgtcacagtttgaatctgaacgtgccctgcagggtcacagtttcaataactggtcccagcttgtgacacaaatttaaggcagtgtgtccattaggatttgggccttgctgatagacaagctactcttaggattctgtgaaggttccagacttctatctctgcttcttgcaatgaaggagtctctgctttggcagtgcaggaatatatggagtgggctgcctggtttcctttccatggtggaatacagtttctcttagctctggagccaatacatcttggcacccttaattttcctttctcagatattgtggtagcatgagacaaagtcactcaaaaagaggtggggacatagttcattcagtaatgtctttgccatacaagcatgaatacctgatttttatatctaacatctacacagacagctgggcatgttagtgtatgcctttaacctagtgctcggacctagaagcaagggggctttcaagggcacacatacacacaagggcatgcaagcacgtgtgtgcacacacacacacaaatacaatttctgtagaacatgaaaagtcatcatatagtaagtgaaataaaccaaccaaaaaccatatgatctcacgtatgtgaggaattaaaaatttttatctgatggaagttgaaatagaaaattgtttattggacatttgaagagcaacaggtctggaacaatgggaaaagctactaaccaataaaggataaagtgatcagtggttactaaattatcactaagatgttcatctatgtgtcattcattacagtgactataaatcacaatatgatgtgccttttaatgaataacagaaaatatataaaatatttcatcttagagaaatgatgaatgaggtgcatagtttggctaagctgattatacaatgtgtaaaaataaatgaaatatcatgggacacagtgttaaaataaataaaatattatacgatacaatgtgtacagataggcaagtaccacaagaaacaatgtgcaaagatgtatcacatgacacctgattcagtgtatattgtttctctttaatgtgacaagtagaaaagaattttagggacagtgatgtagttttgttggtgggggagtatcctggattggtccacataaaaccagctgtggtgtgacatggctataagcctgacacttgttgtgtgtgtgtgaggggggagggggtaacagatagaggcatagtgagtttgaagccagatttatctacaaaagaccatttggtaaagaacaaaatgccacaccaaggaaagcagttttacactgaaacaaaaagttaagtctgctgacttgtgaaagtgcagattaatgtgtctgagaaatagcttctatcttataatatgcctattagcttaggaattgtctaagtacttgctttatacgttaacagagacttagcaggtaacatggtcacattgcacttgctatcattttaggcctgtaattatatgtggtcaatattatcagtgccatcccagataatattgaaagaaattaaggcaatgtgggtataaataaattttctctcaggttggcaaagtccttatattgcctatgtcaagccctggttttattcccccatatcacatacactaggcattgtggtataagctttaaagctgctgctttgcccagcagttggcaaatggaagcctaaatatcagaaattcaaggctatccttgtgtatatatggagtgtgagaccataatggaccacaagatgagatcttgtctcaaaggtggagatgggtataaatcacagctattcagctgtctttctctttaaaatctgtgttcacggtcactgtattacataatttaggtctgattggatcaggaaagtgtttggcctgtaatacctctgacacaaatgagcctctctaacagacatgcatatacacaaacattcaccaattccccctaatgatgaaattggagacaattggctctgttgtttcatctcaccagctgtacttcatctgaagaatgaattccctgaacacaaatcctcagggaaaagatgctaattaatgtacaggattcctatccagctgtttcatacaaagaggtaggagcacaaatccccagggaaaagatgctaatgaaggcacaggattcctatccagctgtttcacacagagaggtagtccatatttaaatattcaggctataaaagagaagtactgtagcagaagcctgtgagtgctgtcagaaggtatttcttgttgaatggcagtaggagcagagtctgccaacaacatgatctgtaagtaagggacagcagctgttctacatcctgttaagggagcccaaggggaaagcatgactgtggtcaggagtgagaccatttccatgccttacccaacactttccactactgtagttgttaaagtgagaggacaacctcagctgttggctttcaccttccatctttgaagcagggtcacttgttttgtacaatatgtgccatgagccagctggccagtgcccctgagattctcctgctgctgctttccctctcactatgaaagatctggggttatggatacctgctactttgtctagaatgacaggggttctggggatctgaactctgataatcatgttttcaagacaaccattttatcttcagagcctacaccatagtcttattgaaagctttaggataactcccaactatcaagtacttaactgaaaaaaaaaaaaaagaatatgtatataggaagaaatagccaaataccctcaaccatatcatacacgtgggttaagatttatttttagatctattgctttaactatatgaagacctaagttaaatgcccccaaacctactttttttttttaaggcaatcaccacagtatgcatgagtaatcctagcaatagggagcagagacagacaggtctatggaattaggggtgcacatgcacagtgtgcacagatagtcagatgatttacacacacatacacacacaaacacacacaaacacacaaacacacacacacacacacacacacacacaagtaaacgtcaaaaaccttatttggtgaatggttttaataggtggcacaaggcacctgcctgtgcagcagacattagcttactcattctgtaccaagaagcagaacaggctgatgacacttcagatttcactcagtgagtgagaggttaactctttttctcctggcagaacttgtaagacatgcagtggcctgtctcttgaaccagaacatacatattaacatcaagggcagcaccccactatctcagctgagaccataattttctgggtggaaactgtacattttttttgtggttgatagtgaggtacagctggttttaaactgagcaaacctataacagacgaaatacaagaccgtgagaaaacattttcatcctgaagatgactgtattgcttaactttctcatggatatgaagtaaaagcctacaaaggcaacttacataatgatcaactttctttcactcacaattttagggcataatccgtcacagcagaaaggtcacagaggccggagcatatgacagttagccactttgtatctgcagtcaggaagcagaaagaggtgaatgctgttgctcgatcaactcagtttctacttgtccaggattcaatatcatggaatgatgccacctacattcagaattaacttacccaatctaggcagtgcattgcagacattcccggaggtttgtctcctaggtaatgctggatcatttcaagttgaccttattaatcattgcatgattataaaacgttataaggaatataatatcccaaaacagatttaggaagttattcttctctctgtactaatgcaaagttcttaagtgaatgaatattaataagtccacagaaatattactgtataattaatattttctgtaaagtaatatgccagagcagatgttgagattacaataccatttggaaataaaatcaagttataaaattaactctgtccactttgcatgttttataaactccatcagtattggtcagtggttctgaaaccgtgggccatgacccctataagtgtcacacatcagatgcattgcattctagatatatacattttaagttatacaagtagcaaaattacagttatgaagcagcaatgaaataattttatggtcaccaaaatattaggaactgtaccaaaggctgaagcattggtaaagttgagaaccgtggatctgatgcctccagttgtatgtacttaattatagatgaaacagttgaaaatgctggtttggctttctgttatgcttcaggattaggagagcatttctggtatagtttagtcatcatgatattcaaatcaagtattacagaatctctgtacaggaatatcatgtataatgtgataaattgtagaagtatgctgtgttctttgaggttaggggcaaactgtatcatattatactgatgattagcttgtattgtgttcttaagtagcctttaaatgaattcatgctacaggcaggcaaggctatgtcctggtttgtttgaaaatcgtgtaagtatcttttttgagtgtctctgtataaatacactctccccaaattgtctttagtcccccattttattgttaattatgcacacaccttttgtttttgttctagcttccccagggacctcaaatgagtatataaatactaatcacaaacaataaataaaaccttggattgctaagacagtgaatcactgaggacttaagcgtttgtgtctctaagcattctaacagtaacctccgcactactgcttaaggtcaagagtaagcaagatactatctccttgagagagcattgcagtcatccagcacagtgaccatggttgcatataaacagaggatgggagatcagtgaggttacagaagtggcttttatttggaaaattatggtcttgtattaactttagctattaaatattctgttattcagcaacaaacttgaaggggagggacatttaaaagcataagcatgagtctgtacttgggagctaatgaattgcttttgaaatacctcactgactggtttctaactgtggccgaaatctctgggctttcttctagcagaggccatcttctaggtgaaataaatgaagataagttgacttctattctttgtcccttccttatctagagaaaatgggtaaaggagacatgtgagtcctctgcttacattgaaattcatgtataactgagtctgaattcaaaaaatatgtttctgagtcaaacatttgtttttcttaaaacataaccaaacaacaacaaaaaaaaaaaaaacaaaaaacaaacaaacaaacaaaaaaaaaacaaaaacaaaaacaaaaaaacctttggtctctttgtatgtaaactcaccactccagtattttatctgtttttaaagtttcttgtcacagcagagagttctaaatttgagatgaagattagttctttgagagtcctgctaggctgctgcctgcccagcaaactgtgcacactcaatcgatagcagttgctaaagagacatccccaggcagcagactctgggttcagctttgcacttctttctttttcagatccctgtggtattaatggagcctttacatgtgatgtcaaattagcagaaatgtcataattgttttaatagtgacaagaataatgacacagaagaacatgatgtagtttgataaagatggagatgaagaaggtggtgatgaatgtgaaaatgatagtgatgtaggcagcgcagtgtttatccaggtcccttattcaattcctgaccatgtagcttcagagagtgtaaaaaacaaaatcaaaatgataaatgaaatgcaagttaacatttctaagtgctatattccatgtacccaaagtatttcagatagttttagttggcacagttttatgaaatatatatttatgttgcatccataccatgatacactagggtgcttctgtgattggacagggccatgtagacagtatcttgagatcctggaatctgatgcaaacaaattatctgaaggtattacacatctttcatgcctctcagaaaaaaagcatgttgatgaataggtatacaggctcaagatttaaaaggaacatcatattatagtgtacctctcacttccttctttctctggacacacatagtagatgtatgcacgtctgtgctcccgtatccatggaaaggttaaataaaacataataattgatccaaaaataaaaacatcctatataacattctcacctctgcccaggtgagtttttagagtaagaatctgatgtgactctcaatccaagaagctgtgtaatgaattaccttcctgatacgagcaagacctgtggctgtgtgatattctgcatgtgggaaatccctgaagctatttaagagctggctattctcagagttaatgactacagaaaatggtttaagaaatcatctttcattgaccaacatttatattttcatttatggaaatgcctgaagctggctcaaatagttttgtctcttcatatttggcagaagactataatggagctaacaagtactaagaactaagaatatacaaggtccaaagatatgatcttttttttctatgttaatttttcatgctactgaactagtgaaatcttattaaacataggaggtgtgtgtgtgtgtgtgtgtgtgtgtgtgtgtgtgtgtgagtgagtgtgtgagtgtgttgagagagagagagagagagagagagagagagagacagacagacagagagagagagacagagagacagaaatcatctagtgccgtcctcatcaatcagttctactcactgagacatctccctagttccccacaaagcatatttttagtgcttctctaccaggtagttttatgtcaacttgacacaatgacacaaacaaaagtcttctgaggaggggtcacaatttaaaaaatggctccataaggtctggctgtaaggtattatcttaattcatgattgttggggagggtccagctcctgtgggttgtgccatccctgggatagtggttacaggttctataagaaagcagacatagcaagtcataagaagtaagccagtaactccacggcctctacatcagctcctgcctccaggttgaatttctgtatgagttcctgtcctatcttccttcaatgatggactgcaatgtgaaagtttaaggcaaatattcttgttcttctgcaattttcttttggtcatggtgtttcatcacagcaatagtaccctaagacaaggagtaggatattaccatgatagatctgaccttgttttagtgagcaaaatagaagccccctcctctcagaagacgtcagtttgtgtcaagataacagaaaactatctggtagaaaagcattaaaaatatgctttctggggagctgggcgggtggaatgttggactataatagacattgagtgttgagaactcagtgagatgttctataggagctcaggagataaaaatattgaaaacagttcagataattgaagcttggtttgggaaatttcagagggaagcaagactttacaatttgagttaagaatctgtgatttcacttgaagaattgaatttgattaacaagttatggtaacaattaaagtgaaacttttgttttggtgggataatatgctggggtttgtgaagaggagactgggaggacaggtggatgctgtgatcttaatgtaaagtgaataaatcagagagagagagagagagagagagagagagagtattaaggcaaaatctctgggaagtgttccattaaggtcagcacacagaagatgtgttccagaagtggccaaagttgaaccccctctattggtagccaaattcaatattgtaagattcatacagttattactggttttgaaggtatgaaggagacatggagagcatctgaggtttttcactctgtggcagctctaaagttcctaaaaaaacaaaacaaaacaaaacaaaacaacaacaacaacaacaacaaaaaacaaaacaaaacaaaacaaaaaaccagaaaacaaaacaaaacaaaacaaaagttcagaagaaggtattcatgaaagggaagttgaatttcaaaagaacagtccagcatttgtaagatgccagtaacatggaatggcaccaagaaaagaaacagccatggagtggtctggtcctgagcctaaaagacaatccttgagtcctgcataaggagaatccaaaaaagtgacccaagccctttgaaggaaccccagaagatagtcagtgtatccagacattaggcaatgggttatttatactgttgggagtttggctttgttttgttcagattggaattgtgtccagtgttttatctcttgaaataacaaagtgtttatcttaattttgattttttcaggagcccacatattttaacctttaagagaaaatttaaaaagtaaaagacacttgattttttaaagtgttgaacttataatatgtttgaattcctgaaaactgttgtacttttaaagttatttatgtttttaatgtgagctcaattagattgaatgataaataaaagattctggtttaatggtgttgtatttgtatgttgagttaacaaggagtgaattatgtagtatagtttcatgtcagtttttcacaattcatctaaaaggaggggacatcaattaataaaatgtctccataagatcaggttgtagaaaagtctgtaggagggtttcttaattagtgattgatgggggagggctaagccaattgtagttgcggtgattcctgggctactggtcctggattctatatgaaagcatactgaacaagccatgagaaataatccagtaagcactactcctccatggcctccatatcagctccagccttcggtttcctggactatttgaattccttgttggcatcgctcagtgatggactaagatttagaaatataagccaaataaaaccattccttcgtagaattcttttggtcaatgtgttttattatgcaatatcaaccctaaataagatagcttcccaagattcgttagggcaggttattgaatataataaggttcagctccatgtcatgtggatttatacatggtacactaggttggctaccacccaccaccaccccaaagcagtggtagtgacatgcagaagctccattcacagtagactctcctgagtactgtttagaaggcattaaatgatggcattttataatgctgaaattttgagtaatagctttcctgggatcagttttgttcatatctcaaacatgtgcaagatattgtcttccaagtagtcctcacatactctgctatcacccatccaaatacacaatcattccagccttctttgcaaagcacaggctttcctttcttttcttccttctttccttctttcttctttccttccttccttcattccttccttccttccttcctccctccctccctgcctgcctgcccgcctccctccctccctgcctgcctgcctgcctgcctgcctgcattcctcagtcttgttttgcttaatcttcaatcaagtttctaaaggaatgataaaacagcagttccctatgtgtaacactgcaagcttctgattggaaaggttattgtggataaatctctctttaatgactctgcatagttgcagcccaagcttacttgcatccaaactgtgtcgaggggcaaactgagtgtaacagtggtgatagagacaggatgagatcctgatgtaccttccctctccagggagggcacatagtcaggcatcagcccttttccagatccaattaaaaaggtatgtccaaatgtgattgtgtgtgtgtgtgtgtgtgtgtgtgtgtgtgtgcactcatacttacacaagcagaagacagataattgatgattttatttttctcttgaaaaagcctttgagacagggtttcccacggaatcaaaggctgattcatcagacctctcagtttccacctttctctgtacattcaatgtgcttgtgatatctgtaagtattgttatatccagattgcttgtgagtgctggggattcaaagtcaaatccgcatgcttgcaggaataatcttacctgctgtctcccagagtccttatttccatggtttcttttgtttgtttgtttgttttaaacatattctttcctgtaatgaagaattttctttaggttctggcttgtactatatatgtatatgtattatgaatgtataggtatttgtgtgtatgtgtacacgtgtacacatgtgtggaggtcagaatcagaaatctgggtgctactttatggctttccacctgcttgttttctgggtttctcacaaattgagactctttgaatgggtaagctgactggccagctaactctggagatccacaagtttccactttatctcactctgaggtttgacatgtgcaccctatgccaagctttttcatcaacggtgggaataaaaaaaaagtcctcatgtttgcccagcaggcacactacagactaagtcttttctctagccccttattgctaaattcataatttttctcttctgaaacactttgtgatttccttgtttagacctggatcagtacccttgtactatttctgaccatgttgtaatgactgctctggttctccattgacctctggtgcctttgttttatgagttgatatctgtaagactgagtatgcagagggatatatacattgtgtggaacatatcaatagaaggcctacagaagctggaccctccacaagacaacagaaataaataacatgggagggtgttcctcatgagagggaagtagtccctcttagcagcattccactgaccacacactaagcctcaggtaatctcccagtattccttcattccatcagggtgtgtgtctagtgaaacagtcaaagagtattcaaagacacagatgagtgacattactgccagataacataatattttcactcttgttataaaaagtgtatatagttaaaagaaattggatcatagagcctaatgtgaaattcataaagctgccacaaaggaacttcttaaagactaattactgttttgagtcctaatgactattgccttcaaatcacataaatcatatacaaataagagaaatatttttcttttaatggaagtgaattctactttggtctccaaaaaaagaaccacacagttttagaagcttaatgggatctctaagcacataaaggatcaagtatctcttgtgaacccagtgtctcatgtacatgtgaagactgagctcaaagcatatatctgaaccaatgagctggattagatttgttcacacctgttctggtttcattctgtttctgtggtaaaataccctggcaaaaagcaacttggagagaaaggggaagaaaagggtctattcaaagtatactttttatcacacacacacacacacacacacacacacacacaaacacacacacacacacacacagagagagagagagagagagagagagagagttagtttagtatcccttgcctcagaaatagtgttactcacagtaggatgggttctctcacatcaatcaaaaataaagacagtctgttagagacatgctgacaggacaagatgatataaacaattcttcaattaaggctctctttccagataattccagattatatcatatcaacagttaaattctaatatccaccaagtcaaaatttaaagttaaagaaactcttaagttcataattcagcatatttttctaccatttgagaaaggctccatagggaagtagataagaacagaatgccacaggaaagtgccagctggtttgtattcagttgcaataatgaaacttggttctgtgaaacatattttgagctaaaggtaagtcagattgtgggatattttgtgctagcataaatagaagcagtgaaatagaagataattgtttctcattaaagtgcttaaaattgggctgaataaataaactggagcccatctactaggtgtgctagaggccttggtgtccaattattacttcctttgaggattttcaaggaagccataagattagactgaggttacagattcagaagaaattctcaaatggctgagtttcctgctactaatctaccttcccctcatccaaaatagaaatagtgtggaataaactttgcatttacatttgctacagaggtgactattacttccactgactacagctttgctaataaccttccaaatactagattttcttcattgtctaggtaacttctgttacctcttgtcaacccttggcacttcagtaatatccatgccaatcagtaaaagatcacatctcactaaggtattgactcatagttctctgattcagcacattttatttcctttggttagtgtctatcttctttaaaatatccatttaggatgtgtccatttcaacaaggtggttttatatagcggttgagtagcaaaatctttatgtatttagatgttactaaccctttcgctggacaactatttgggaagtgatttttcccattctattgttcagcattttaaaaagtagcctatggagttacaagactatatgagattcccagtcttgtttatagagacattcagaaatgtgcataccctgtgatcttcaacattacacaaggacagtataaaggaaaaccagtcatgagacagaggaaggatttaacagtgaattgaataaaattagaggcagaaatattatgaaaataattaatttgtcatgaaagagaaggaccatgtgaatggctgacaagatttaggtgtagattatggatgcgtaattggggttataaacgtctttgacaacattagcattagttctgggtgaataggattgtgattaaaagtaaggaggacagaggaactaaagacaggaagcatcagtagagcctatggattttcagtgtagaccagaaaagagtataaaaatatagcaaatactaaaatttataaaatcaaggatatttctcataagatgagaaaatactaatgagaacataggtatagatatgatgaaacagatatagattgtaaatgagggaggagtggtggttcctgaagtagtgccttttactagacatgaaggatgagaagaaatgtgtaagttggtattagatgctaaaataagtagtttgtttgttgtgactaacaaagaagtaggaaagatgtgtcaatgtggaaagaagttgctatacaaatttgagaatctgagtttgaagccccaaagacaacattaaaacctgacataatagtacatgtctataatttcagcactcctaatgtgaggcagaatgcataggaggctaagactggagaatacccacaaaatataggccagctaaacaaccatgaaccatgagatgtagtctcagtaaaggtggaaaacaaagccaggacacatgacattgtctcctgactatacatatgtgtacccatagtcacatacatgtgtgcatacacacacacacacacacacacacacacacacacacacacacannnnnnnnnnnnnnnnnnnnctggtttaatggtgttgtatttgtatgttgagttaacaaggggtgaattatgtagtatagtttcatgtcaatttttcacaattcatctaaaaggaggggacatcaattaataaaatgtctccataagatcaggttgtagaaaagtctgtaggagggtttcttaattagtgattgatgggggagggctaagccaattgtagttgaggtgattcctgggctactggtcctggattctataagaaagcatactgaacaagccatgagaaataatccagtaagcactactcctccatggcctccatatcagctccagccttcggtttcctggactatttgaattccttgttggcatcgctcagtgatggactaagatttagaaatataagccaaataaaaccattccttcgtagaattcttttggtcattgtgtattattatgcaatatcaaccctaaatacgatagcttcccaagattcgttagggcaggttattgaatataataaggttcagctccatgtcatgtggatttatacatggtacactaggttggctaccacccaccaccaccacaaagcagtggtagtgacatgcagaagctccattcacagtagactctcctgagtactgtttagaaggcattaaatgatggcattttataatgctgaaattttgagataatagctttcctgagatcagttttgttcatatctcaaacatgtgtaagatattgtcttccaagtagtcctcacatactctgctatcacccatccaaatacacaatcattccagccttctttgcatagcacaggctttcctttcttttcttccttctttccttccttctttccttccttccttccttccttccttccttccttccttccttccttccttccttcctttctttctttcttccttccttccatcctttctgcctgccagcctgcctccttccctgcctgcctgcctgcctccctccctgcctgcctgcctgcattcctcagtctgttttgcttaatcttcaatcaagtttctaaaggaatgataaaacagcagttccctatgtgtaacactgcaagcttctgattggaatggttattgtggataaatctctctttaataactctgcatagttgcagcccaaacttacttgcatccaaactgtctcgaggggcaaactgaatgtaacagtgatagagacaggatgagatcctgatataccttccctctccagggagggcacatagtcaggcatcagcccttttccagatccaattaaaaaggtatgtccaaatgtgattgtgtgtgtgtgtgtgtgtgtgtgtgtgtgtgtgtgcactcatacttacacaagcagaagacagataattgatgatnnnnnnnnnnnnnnnnnnnntatagagattgccatatacagagatccatcccataatcagcctccaaacgatgacaccattgcatacactagcaagggtttgctgaaaggaccctgatatagctgtctcttgtgagactatgccggggcctagcaaacacataagtggatgctcacagtcagctattggatggatcacaggggtcccagaaccattcttaaggcagctaagtttcctattctgtgttgcataattttcccctaaatctcttgctgtctacaatttctgatcaagactctttgagagcaaaaaccctgtatcttgttgcctacagttcccactgctcttgttgcatttgaatatttttggtctcagtgaaatgtttaagaaaagagagtccaagtcacttctaaatttctttctccagccagggctggcgtgtcatccaactgttaggaggaataccactactgctgtaagcttgcacgaatgatgtactttctcagagaccatagaccataaagtttgatagcaatgcatatgacacagtttgaccctgaatgtgccctgcagggtcacagtttcaataactggtcccagcttgtgacacaaatttaaggcagtgtgtctattgggacttggggccttactgatagacaagctactcttaggattctgtgaaggttccagacttctatctcttgcttcttgcaatgaagaagactctgctttggcagtgcaggaatatatggactgggctgcccggtttcctttccatggtggaatacagtttctcttacctctggaaccaatacatcttggcacccttaattttcctttctcagatattgtggtagcatgagacaaagtcactcaaaaaaaggtggggatatagttcattcagtaatgtctttgccatacaagcatgaatacctgatttttatatctaacatctacacagacagctgggcatgttagtttatgcctttaacctagtgctcagacctagaagcaagggggctttcaagggcacacatacacacaagggcatgcacgcacgtatgcacacacgcacacaaatacaatttctgtagaacatgaaaagtcatcatatagtaagtgaaataaaccaaccaaaaaccatatgatctcacttatgtgaggaattaaaaatttttatctgatggaagttgaaatagaaaattgtttattggacatttgaaggtctggaacaatgggaaaagctactaaccaataaaggataaagtgatcagtggttactaaattatcactaagatgttcatctatgtgtcattcattacagtgactataaatcgcaatatgatgtgccttttaatgaataacagaaaatatataaaatatttcatcttagagaaatgatgaatgaggtgcatagtttggctaagctgattatacaatgtgtaaaaataaatgaaatatcacaggacacagtattaaaataaataaaatattatatgatacaatgtgtacagatagggcaagtaccacaagaaacaatgtgcaaagatgtatcacatgacacctgcatttcagtgtatattgtttctcttttaatgtggacaagtggaaaagaattttnnnnnnnnnnnnnnnnnnnnataactcagcataaaccaattctctcctcctaccccaagagtacttgtaattgaactcagtacttctaatttggtagcaagcaccttcatccactgactcaactcattactcctacatcttacaaacacttgtatagaagtattcaccttgtttgatggtttgtatatctttggcccagggagtaacactattaggagatgtgtccttgttcaagtaggggtgtcactgtggacatggctttaagaccctcattctagacgcccggaagtcagtcttctctgagaagtcttcagatcaagaagtagaactctcagatctgcctgcactattcttgccttgttgctgccatattcttgctttgttgataatgatttgaacctgtgaacctgtaagccagccccagtattatccttgtaagagttctcttggacatcatatctcttcacagcaatagaacattaactaagacactttgttttcaaaaaagctacaaacattatcatgtatattctacacgaggttttcttcattgtctaggtaacttctgttacctcttgtcaacccttggcacttcagtaatatccatgccaatcagtaaaagatcacatctcactaaggtgttgactcatagttctctgattcagcatattttatttcctttggatagtgtgtatcttctttaaaatatccatttaggatgtgtccatttcaacaaggtggttttatatagctgttgagtagcaaaatctttatgtatttagatgttactaaccctttcgctggacaactatttgggaagtgatttttcccattctattgttcagcattttaaaaagtagcctatggagttacaagactatatgagattcccagtcttgtttatagagacattcaggaatgtgcataccctgtgatcttcaacattacacaaggacagtataaaggaaacccagtcatgagacagaggaaagatttaacagtgaattgaataaaattagaggcagaaatattatgaaaataattaatttgtcatgaaagagaaggaccatgtgaatggctgacaagatttaggtgtagattatggatgcgtaattggggttataaacgtctttgacaacattagcattagttctgggtgaataggattgtgattaaaagtaaggaggacagaggaactaaagacaggaagcatcagtagagcctatggattttcagtgtagaccagaaaagagtataaaaatatagcaaatactaaaatttataaaatcaaggatatttctcataagatgagaaaatactaatgagaacataggtatagatatgatgaaacagatatagattgtaaatgagggaggagtggtggttcctgaagtagtgccttttactagacatgaaggatgagaagaaatgtgtaagttggtattagatgctaaaataagtagtttgtttgttgtgactaacaaagaagtaggaaagatgtgtcaatgtggaatgcaattgctatacaaatttgagaatctgagtttgaagccccaaagacaacattaaaacctgacataatagtacatgtctataatttcagcactcctaatgtgaggcagaatgcataggaggctaagactggagaatacccacaacatatagaccagctaaacaaccatgaaccatgagatgtggtctcagtaaggtggaaaacaaagccaggacacatgacattgtctcctgactatacatatgtgtacccatagtcacatacatgtgtgcatacacacacacacacacacacacacacacacacacacacacacacaagactaaacaagaaacaatagaaatgatatcagaaaatgcacattctggagctgatatgttgacaggtcacaatacatactgtgtaggaattttagatatttttgtttgattccttcagtgttaaaatcctggggagctcgcttggtcaataaaatagttgctgtggaagctgaatattgatccccagtgttcatgaaaaagccaggtctggtggtctgcaactaaaatcccaatactgagaatgtagggacctgaggacttacagggttccatggctaacctgtctaaccagtcattatcaatgagctccaagtcaaccattaggaaactctatttcaacaacctagatgaagataaaccaaggaatacattgctgacatttagcatgtatacatgcacaagtgagtatgcacactggcatatatatatgttatacatacaaattagtcacacacacacacacacacacacacacacacacacacacacacacacacccaaagacataacctgacttctagagagtttacagcttacagccaatacataacagtgaatgttaggataaatataacaggtgatatcaggactgtgatcttcaaggatccaggtagtttcctgagagatacaacatcgtgctgaattatgaaggatgtgaaaatagaagcctaaagtgaaacttcccacacagaaggccctctgtaagggaggaatggctacttgggttgcttcgttttaaagtaagcctatgatctttggaagcagcttgatttaatctgtgcaccatctgactctaaaaattattaagtaaatacattaagaagttcttcaattcctaactcattctttctctatgaacacagatggcaaaaactcaaccataagtagacaagtttcataaggcaagtgatataattctgtccagtttgatgagattatattttaggatgtaaatgtggttcccttgcaggagcatcctaatcactatgtttagttctacattttcctgtaatataagttttgtattatcactttcaattaaacactttttatcatattaatatattcattgtatgtttcatatgagtgtacattgtgacatgccgtgtgtgtaagaagaaaacaactttgtgtcatagttccctccttttgtgtgggaaccagggatggaatccaaataatcaaacacctttatctgttgagacgtctcttcagatcccactgttattttcaaatagtaattcatacttacatccgcacactcatgtacacacacacacacacacacacacacacacacacacacaccacagatagagtcaaaaatgaagaaagagggaagagacagagacagaaacagagacagaaacatacagagagtaaaaaagaaaggaatatatatatatatatatatatatatatatatatatatatatatatatttgtctcaaagttatatacatgcataaataagatagattaaattttagtgcttcaaactgaaatgttccactaaaattttgtggggtacttgtggagaccatagtgtattctattacaaatgtttaattcagaaacatatttggaaagagtcaataactacatttttaaaaatcacttttatttttaatttttgtactgtaaacagaaaatttctgccctttgtcatgcaaaaaagtatatctgaatgcacagcactgccaatgtgtaatagaaagaaatatgaaaactatatgggagataaaaaatgaatgatgcactactctcatgcacttctgacctggcacttggcctattctttagtttgttgtactgatagtacattccctgtgacagtctgctacctctgggactataaacttaaattgtttaccattgtgtaggtttgagggaggagtgtggggaaataaaaccctaaggaagagagagacagtaaatattatctttcacagaaggatacacaaaaaggaaagggggtttcaagcactagaaaaattcatattaatactgaacacacactcgtaattttcctatgattgctagcaataattggaatcatactttttggcccaaatttgagtaaatgtgcttttctccttaatgtcccttaatatgacactgtgctatgtttataacattttctgctctcttgtgtactcaaggaaagttttcattgtctgggaaagagtccaactctacaatgcagctgactgcagagagtgtgcaaagcatcacatgttatgcacttgggccactctgctcaaccatctcaggcagctttgttggaaatgggaaatgagtataaataagcttggtataaagattccagtgaatgtttatcttcgatgccacattttcatacagaggatccttcaaattaaaatgtaatattcaggctattgtagctattcagattttgctgtactggtttgtcttcctgtatccctcaattctcttcctcatcctcacatattaaatggaaagaaaggaaagtccttcatatgccctttctgactctcctaaaacccttcagtttcctttgattatataagtgggatcttaggttttgattcaatggactagttttgtgactctgtggatagcgaactgtgtcttcaaaaatattctcctgaaaaaaactggaatttcctaaggaaacatgaaaatttagattgtttaccttgtcttaactagaccattcttaaacaggagatgttatgttatatctcagtgagtaaaaacaagatggtgtcctctctcttcagctcagaataaaggagattattgcaagaaaaccatatcatgagagtaaccatgtcatatttatgttctcacattacagttacaaaataagtctgtggatgtgtgtgtcaaattggatctcttacttccactatcttctcccaacccctctctcatcccttcctttctccagctatcttccctttctctttctttctagtttcttttctgaggcactgtcacactgtattcaaactggcttgaaaaccctgaccttcctgtctcagcctacaaaaagttaaaattacaagactacaccattgcactcttcttaaactagatttttaatttaaaatggcacattcagaaacaacaaagaaaacaacaacaacaacaacacagaggcaacgcactttaattattatccatattcagaaggttgtatttcaactctgatgaacagatgggctttttaaaaatttatcccaagttattgaggcccagaagaccgaaataatgaatttgtgaacaatttgatgacatcgttctatgttatgcttgctattcttaaatctaatccccctcctgtttttcttttaaggaagtttacagattcaatatcgactaagcaaggaagaaagtcatgtgttcaccatcagcacagagaatcttgccaatagaagagtacaccaggtgaagatgagccgagatgggccagaactttccattcaggtacttcacttttcacctttttacacagccaacatgccaaggcttctttatctaacatatctgagctccaccaaatcacatactgcaatgatcctccttatcagtggtgttgtaatcacatgggaaagagctagaaatgcaaattgagttccccttgagagctatcttatcaaatattattgaagaggaggaatcactggacattctacttgtactcaagtttattcacctcttaaccagactaaatgaagaacaagaatggatgagtgaaaagagtaatgtacagaagactgtagctaggctgtaggggaagtgggcataggataccagcacaggtttcctctacacatcactatgcactttctagtaaaaactgtgtattgaagacaagaaagagttacctgggcagaaaagacagagacatttgaagggtttatatatacacaggcacaactttcaaaaagaaagagtgcagcaggcttctgtgaattagtagtgactgtaaagagccaacagcagagcagtgctgatcttaatcaagtccagcaaaatcaagactacccttttttgatcatacgtgagaatggccattagcttgctagtcactatttttcttacttaagcttaatacattcatcttgtatcctccaaatgtatcacatcaaatgccctcattccttgcaaccaacagatgcaatgacatctttctcagaagatgattttgctgtcttaatctctgaattatgtatcctttagaagaggcttcacacattctcattactctatctcctcctagctggacctgagagcttgtgcacactctctttcatggctgatgtcaatagtcctgccattctacctgtgagttagacctcgtgatcttctcacaagcacagctttaacttcctgctcttttctagtcccttgaccatctttccagttccaccaaatagttacctgaagcacaaaacaagtaattcttgaatgtagcaaaaacaagaaagcaaaccaaccaaccaaccaagatttttctggcataaggaaagaaatccatttctcaccaggtattcaaattgctagacttttatattgtaaaggaaaagttgagatatactgatttccaaagttcatcttctatgtaacaaaatacctaggaagctgatgaaaggaattgtggcttgctgctggagggtacagtctgtcatttctacagaagcatgaggcactatgtcacattccctctgaggaagtacagagagaggaatgcttgttctcagctcactttctattttttactgattccagaacctcagcttttagaatgagggtatactcatttgagtgggtattttcaccacagttaatctaatctagaaagtctctgcaacatgattgtaagtttgtttctatggtgattctaaattccatgtatgcactacagagcaattgtgataaaaactgcatggtactgctatagtgacagacaagtagaccaatggaacagaattgaagacccagagatgaacccatacacctatggtcacttgatctttgacaagggagctaaaaccatccagtggaaaaaagacagcattttcaacaaatggtgctggcacaactggctgttatcatgtagacgatttcgaattgatccagtactatctccttgtactaaggtcaaatctaagtggattaaggatctccacataaaaccagagacactgaaacttatagaggagaaagtagggaaaagcctcgaagatatgggtacaggggaaatattcctgaatagaacagcaatggcttgtgctgtaagatcaagaatcgataaatgggacctcataaaattgcaaagcttctgcgaggcaaaagacaccgtcaataagacaaaaagaccaccaacagattgggaaaggatctttacctatcccaaatcggacaggggactaatatccaatatacataaacaactcaagaaggtagactccataaagtcaaataaccacattaaaaaatggggctcagaaatgaacaaagatttctcacccaaggaataccgaatggctgagaagcacctgaaaaaatgttcaacatccttaatcatcagggaaatgcaaatcaaaacaaccctgagattccacctcacaccagtcagaatggctaagatgaaaaattcaagtgacagcagatgctggcgaggatgtggagaaagaggaacactcctccattgttggtggggttgcaagcttgtacaaccactctggaaatcagtctggaagttcctcagaaaactggacatagtactactggaagatccagcaatatctcttctgggcatatatccagaagatgccccaaccagtaagaaggacacatgctccactatattcatagcagccttatttataataaccagaagctggaaagaacccaaatgcccctcaacagaggaatggatacagaaaatgtggtacatttacacaatggagtactactcagctattaaaaagaatgaatttatgaaattcctacccaaatggatggatctggagggcatcatcctgagtgaggtaacccagtcacaaaggaactctcacaatatgtactcactgataagtggatattagcccagaaacttaggatatccaagatataagatataatttgctaaaaacattaaactcaagagaacgaagaccaaagtgtggacactttgccccttcttagaataggaaacaaaacacccatggaaggagttacagagacaaaatttggaagtgtgatgaaaggatggaccatctagtgattgccatatccagagatccatcccatgatcagcttccaaacgctgacaccattgcatatactagcaagatttctgaaaggacccagatatagctgtctcttgtgagactatgccagggcctagcaaacacagaagtggatgctcacagtcaatagctattgaatggaccacagggcccccaatggaggaactagagaatgcacccaaggaactaaagggaactgcaaccctataggtggagcaacaatatgaactaagcagtaccccggagctcttgcctctagctgcatatgtatcaaaagatggcctagtcggccatcactgcaaagagaggcccattggacttgcaaactttatatgccccaatacaggagaacgccagggccaaaaagggggagtgcgtgggtaggggagtgggggtgagtgggtatgggggacttttggtatagcattagaaatgtaaatgagctaaatacctaataaaaaatggaaaaaaatgttactggcacataagccaatacacaccaaacaagcaaaacaaaaaacaaaaaaccaaacaactgtgaaaaaaaattatacatactaagcagactgtacaggattgcaaagcaactgtacctactaaaataattttctgttcattagaatggacacagtgttctttcgtccttcatagttagcttccttagcaatatacttttctgcctctcatcaactgtcgtctcgttaggatctttttcagtgttgtatgacatttcaatgattcaaactgatctgccattcatcatgattagtatttggattcagtggttcagcccaactttctaaagcgataattttaggtcagggcttcatgtttgatgagttttgagccacataacaatagtgcaatgaacctcaaaaaataatcacaatcatttctacagtgtacatagaactctgttttcccaggggttatatatgagtgtggtacaccctatagacccttagcagtgccaatcttgatttgagacagcaaggtgagaatgcagtggtgctgtattgtggttttaattttaataaaaaaaattccatgtatctgaccatcatgattaactactagttcctcttagtcgcaccatgttacacaaaaattgtactactcaagacatgaaagagtttacttttgccaaaacccagtgttagagcattgtgtgaaatatttctagttaggcatgcacaaatgtcttttcattccaaacagcaacacaacattaggatgctactaagtctaagttagtgaactcatgagtcttattgaaattactagcaggagtatatatgagctgttacattagcaagcaatgacataaagacagctatatcaccaaaatgcactttggcgtaggttttgactcatgctggtaacctgggatgtactgtacaaattaaaggcagagcagtggttagggaagtgcttgttttaggcaacatattttgggagctaagagcctagtcctaatgtatctggccagtttcaaagtcatcctgaaggctttaaattatttatgtatttatgaagataaatgaaattccctgtaggacataatatttaccttccccatgtgtaaccaaccatgattacttagcagaccaaggctacctgatatgactgaccagtgaaggaataaaaccaggctctctttgaatgggctgcaagaaaagtgaggctgtgacatatattattgtgagtaattagaccttttaccctattataagaaatagaatactgtggtgattgctaccatcaatacagttgcagttgctgggatataataatgtttgcaagttcttcaatatacactaaattaatgtctaagaccaactgtcctgttatacttccaagcaaatatacaaagaaacatagctgtctgaacacatcactacctgagggagaacctcagtttctagagaatttaaagtcccacagtggcccaaaattcatagacagtaactggaaaaacctataaaatgtggctaccatggcagataggggaggcccactctatggttccctgcatccaggcttttctccaatagaaaaaagggctatgcatggggcacagcagcctagattgctctcagtctttgggacttaacttacattttgtttgactattattactcttctctgagttttttttcttaccccattagcttattggatcattgctgtgttttgtgagacttaagtcattcctcctacctagtggtgaacacagtattcaatttgacctctgcttttgtttatatagtcatgtgataacttatgttattcagcctcatagtttaaaatttgcccatatatcaatgcctttctatatccggacctctcctaatgtcctgcaacctgtccccttgactttttccacacactgttcattatttttttgttatcttatttttagctttaggaaattatgctatatagcatataaagtaatttacttacttccttttcatcatgtaaccctcccctagaatgtaagtttgatgaaacaggtttacatttgctatttcagagataactctttaccaaacagtccctagagggatatctgtgaatattatacacaaagcagctggtttccccactgttgcatgaaaaatgttctaaaggtttatgggcattgtggagaagaggagatcttctagtttcatttctgttgctgtaataaatatcctgaaaaatatcaacttaggtcagaatgtgtttattttagctcataatttcaggttacagtctaacataagagtaaaatcaagaggaggcgtgacataaaatagctagtaatatcatcattcataagcaaagataaatggatgtatctaaagtcacttgtttacttatacacagtataatttctctagaatttggtactgctcactgtaggctgagtctttccacatcaattaatttaatataattccttacagacttgcccaatgactgatgccatgcagacaatgtttcattgagtctctcttccatttgattctagaatgtgaaaagttcattcttaaatcaagactaatataaataagaattaagagattaaacatgggaatatcctggtaaaagcttcacttttttacatccatgtgttcatgggatagaaagatgtatttagacgtgagtgaactaaggcaaaaatcagtcagaaaaattttctcccttgaaacatacaacacagagaggaatggagagcagatatcctttaatgtagcctatgagagaacttaagagtgactactagttattctgatgatatggaagaccagatataattattggatgtataaaacaaatgattcaccccttctgccctctgcttgctgctggggtagacctcttgttggtctgctcccgtgaagactccatatcctgatccattctagaggacctgttgcactcagcagttggtaagaactaccctcctgccacagtagtaccagagctgctgatggaagcctggtgtactcgggtaccatcaccaaccaaaacccatgtcctccggaataccactccccttcagtcccttgtaccccttcctcctggtcctttttgctgggcagactacttgttggtctgctcccatgaagacaccatatcctgatccatgctagagaaccttctgcactcagagcagttagacccactgtactcagagcagttgagcagctgatgatcctctgcactcagagcagttgaggattggctgtactcagtgtagttggacaacagcatgactgttccactgaagacccaacagtctaaaggcttcccaggagagctacaacagccagggcaacagatcagcagcttctctgccactgcaaagagccctcagttggaaggccccacaggtggtctgatacagtcagggccacatgcatatgggaagaactgaagcaacccagaggcaagagaggcacactccttatagtcacccaaactagcaaacagcagggatatccagatggagaaaggcaagcaaaagactataagcaacaaaagccaaaatatgtgggcatcatcagaacccagttctctcaccacagcaagccctgaatacaccaaatcaggaatctgttctaaaatcctactcatgaagaaaatagagtcctttaaggaagatatcaagagttcactgaaagaaatacaggaaaacacaggtaaacaggtgaaggagttgaataaagagatccaagacttaaaagtggaagtagaaacaataaagaatccacaaatggaggcaaacgtggaaatgaaaaacatagggaagaggtcaggatttacagatgtaagtatcaccaacagaatacaaaatacagaagaatctcaggtatagaagatatagtagaagagagtgacacaactgtcaaagaaaattcaaatcataaaaaatctcctaacacaaaacattgttgaaattcaggacacaatgaaaagaaaaggccaaatcagaattaggaatactcagaatagaggaaaactaagattctcagctcaaaggtcctgaaaatatcttcaacaaaatcataaacaaacaaacaaaaaacttccccaacctaaagaaagagatggccataaaggtacaagaagcctatagtacatcgaataaatgggaccagaaaagaaaatgttcttgtcatataattatcaaaatcctaaatgtccagagcaaagaaagaatattaaaagttgcaagtgaaaaaggccaaatacaaatcttataaagaaagatggacctatcagaattaccatagacctctcaccagagactatgaaagccaggagagcctggtcagaggtcatgcacactctaaaagaacacaaatgcaagcccaggctactatatccagcaaaactctcaatcaacatagatggagaaaccaaaatattccagaacaaaaccatatttaaacattatctatctaccaatctagccctacagatgatcctggaaggaaatctccaacacaaggaagatacctgcaccaaagaaaggacaagatattaagcatatcacaacaaagtcaaagcacataaagccacttacaaaaacaaacatatcaagaacagtcatctctctttaatatctctcaatattaatggactcaattcatctataaaaagacataagctaccaggctgaatatgcaaataagttccagcatttttctgcatacaagaaacacacttcaataacaaaaacagacactatctcagagtaaaaatatggaaaaggtcttccaaacaaacggtcccagggaacaagcaggagtcgccaccgtaatgtccaataaaatggactttcaaccaaaggtatcaagcatgaggaagaaggatacttcatatatccttcatagcactaagtgccctggtaaagaaactggagagatcttacactaactgcttaacagcacacccgagagttctagaacaaaaggcagcaaactcaaccaagaggagtagaaggcagaaaatagtcaaattcaggaccaaaatcaaccaaatagaaacaaagaaaacaaaacaaagaatcagcaaaaccaaaagcagtttctttgaaagagtcaacaagataaaaacctagtcaaactaattaagggcagtatcaaaattaataaaatcagaaaggaaaagggaaacataacaaaagaaatggaggaaattttttaaaaaaaatcaccacattctactataaaagtctatactgaacaaaactggaaaatctagatgaattggatagttttcaagagaaatgccacattccaaagttaaatcaaaagaaggtaaactatctaaacaggccgatatcacacaagggaatagaacaaaccattaaagacctctcaaccaaaaaaacccaggaccaaatggatttagtgcagaattctacccgaccttcaaagaagacctggtaccaattttcttcaaactatcccataaaattgaaacagaaggaacactacccaaatcattctatgaaggcaaaattacacttacatctaaaccatacaaagacccaaacaaaaaagagaatttcagaccaatcttgcttatgaatattgatgcaaatatactcaatgaaattcttgcaaatcaaatccaagaacacatcaaaactatcattcaccacgattaagtaggcttcatcatcccaaggatgtaaggttggtttaatatatgataattcattaacataatccactattaatcagactgaaagaaaaaaaatcacctgatcatctccttagattcaaaaaagcgtttgacaaaatataaaacctcttcatgctaaaagtattgcagcgatcagaaattcaaggcccatatctaaacataataaaagcaatttactgcaaaccaacagccaatcataaattaaatggagagacatttgaagcaatcccactgaaatcagagacaagacaaggatgcccactctccccatatctatttagtatagttctcgaactataagctagaacaatagtacaagaaaaagagatcaagaggatgcaaattggtaaagaagaaataaatatccctgtttgcagatgatatgatagtatacataagcaacccaaaaaattctaccagagaacttgtttagctgattaacaacttcagcaaagtagccgggtataaaattaactcaaataaatcagtagtgttcctctatacaaaggataaacaggctgagaaagaaattagggaaacaactcccttcacaatagccacaaataatataaaatatcttggggtaactctaatcaaacaagcgaaagacctgtttgacaataacttcaagtctctcaagaaagaaattgaagatcacagaagactgaaacatctcccatgctcagggactggcagaattaacatagcaaaattggccatacaaacaaaggcaatccatagattcaatgaaatccccatcaaaatcccaacacagttattcaaagacacggaaagagcagttctcaaattcatttggaaagtcaaaagcccagaataatgaaaataattcttaacaataaaagaaaagccaggggaatcacagtcactgaccttaagctttattacagagcaatagtgataacaaactgcatggtataggtatagagacaaacatgttgatcaatggaatagaagacccagaaatgaaaccacacacttacagtcacttgatctttaacaaagatgccaaaaatatgcaatggaaaaagaaagcatcctcaataaatagtgctggtctaactggctgtctgtatgtagaagaatgaaactagacccatatttatcaccttgtacaaagcacaactcaaagtggaccaaggacctcaacataataccagatacactcaatctcatagtgggaaagagccttgaactcacttgtacagggggaaatttcctaaacagaactccagtggctcatactctaagattaagaattgataaatgagacctcatgaaacttcaaacttttgtaaggcaaaggacatagtcaataagacaaattggcaacctatagattaggaaaaaaatctccactaaccccacatccaatatataaagaactcatgaagttaatcaccaaaaaaacccaaaacaactcaatcaaaaattgtggtacagaagtaaattgagaattcacaactgaagaatctggagtgggtgagaaccacctacagtaatgttcaaagtctttagtgatcagagaaatgcaaatcaaaatgaccttgagattccaccttataccactcagaatggctaagataaaaacctcaggtgacaacatatgttgaagaggatgtgtagaaagagtaacactcctccattgctggtaggattgcaaactggtacaaccactctggaaatcagtctggagattcatcagaaaattggaaattgatctactggaatatacccagctaccaatcttgggaatatacccaaaagatgctccatcatgcaataggggcatatgttccaatctgatcatagtggccttatttgtgatagccagaagcaggaaaacctagatgtcccaggacggaagaccgcatacagaaaatgtgattcatttacacactggaatactgctcagctattaagaaaaaaaaacatcctgagttctgcaggcaaatgaatgaactagaaaatatcatcccgagtgaggtgcccaaaaggatgtgtctggtatgtagtcactactaagtagatattaagcaaaaaacaaaacaaacaacaacaacaaccaaatacccaagatatagacagtctacagaactcaagatggtcaacaagctgaagtgcccaagtgaggatgtctcagttctattgggaaagagaaagcaatcataagtggagagggatggaggaacctaggaggaaaagtggatggtgggggcagttgtggggagaggagaaccttatatggtattgggtgaggggaaaggactaaagccccgaggaccagcagaaagaatggtaacaggctaccttaggaaatagatggttgggggagtactccagaatgcaccagaaacctgggaggtgagagattctcaggattcaaacagagggaccttagataaaatgcctgtcagtagggagaaggactttatagagcctacctccagcaggaagacaggatatcaagtgatggatggggttgccatcccacaatcacacgacccagaattgtccctgtctgaaagaattccagggaatgaaatggagaggagcctgaggaaaagaaggtccagggacaggcctaaagtgggatccagctcaaggagagaccccaatgcctgacactattactgaggttatagagcactcacaaaaagggacctatcatgagtgccctctgaaagacccaacaagcagctgaaagagccagatgtagatatttgtacccaaccaatggacagaatcagctgacagaagcagctttagagaattagtgaagactgaaagaagctgaggagaaggacaatcctttagggggatcagcagtctcaattaatatggaccacagagatctctcaaactctggaccaccaaacagacagcatacagcagctgatatgaggtccctagcatgcatacaacagaggactcacgggtctgtgttcattaagagatgatgcacctaacctcaagagactggaggccccaggtagtttagaggtcagttgcggtcggggatgggggcatccatgtggagacagggaggtaggaaggaggtatgggatgttgaacagttggagggtggatgggggcaggaggggaataaaatatgaagtgtaaaaaataaattaattaaaaaactaaaaataaaaatgaataaataaatgattcttgtaatgtcagaagttacctcttattattattatactctttctaaaatgagtagggtaaacacatttgaatatgggtgaggtagggtggtttgtatagctgcttaattgatgagtgatacaaattgtaaagatagcttcctgtttggttaatatgtgtgggtaccatgtggactcaagaggacaaccacttgtctaagagctatcctttgatacaaggattcttgtaggtctataaatcatgaagagatgctaatttggctccttagtgagctcaagagatctgtgtgcttcttccttccaagtgctgggattaccaacaaatactgtcacacttgacattttatctgtattctgggaccaaattaaggtcctttcactcctgaggcaaacacttcactgactgaactcatcctccagcaccttgtttgtttataattttactgaaaccttatggaaaaattgggcatgttcatttcagcatttaacaaataacatttttaatacttttatattttctgacctaatcacaattaagacacatagaacacacacagggagaatggtaaaaggtgtatgcttcctttttccgtctatgtaatattcactaatcaatttatagtttataataagcaggcacttcctatttgcaatgttatgaagaaagcaaaaaaaaaaaaaaaaatctagagcacagatcttacattgtatcaagtctgttggccaaggaagaaagtatgcttgtctttctgaccattctaccccattacaagccaatatatatctctttctctttcattctgaaaatgttatttaatgcaagcaagcatacaaatacaacaaaagcataaagcaggtcccaaatatatccctagcctgggccagcctgtgtggagcatttcaggaatgctacacaactgtcagaaagaaagggcaggtggttattactgcactcagccaccaagtaagatccctagcacacttgcatttccctatctctgtttgtctattgacattgtcttttgaaggacatgtagacaaacctggctacttgaagacatagacagggatcttgagcccaaaaacagcatgaccatacaaagctacttaggtattaatgtgtgccttggctaagttattctccatgtgacttctctttctctgtcactaggttgatttatttcataacattgtaaggaaaaagaaactctaatgtatgcccttgtgtccagtttcatacattatttactaaataagaaataatttagtctaattaaaaaaacctgtgaaatagcattaaaccacaaactatgggtaatagactgtactaagattacagaatacactacaggatcaggagtttcctgcagagtcacttagtgtgtgcatgtgtgtgtgtgtgtgtgtgtgtgtgtatgtgtgtttgcgtgtgcgtacatgcatgcatatgtgtgtgtgtgtgtgtatatatgatgtatgtgtgtatgtgtatagaaagagagttatggatggaggacctaggtggaaaggttaggtattagtcctgacccattattttccccaagtagagcaatctcttcctttctagcctctgtactattaaatgaagaggatagtatcatttggatattcaaagtggagatttaaggtcaggagccaggtcagaggccagggctcagtagatgaagcacttgccttccctgaatgaggatctgaagtcagatcatagaagctttataacaatctaggagggatggcaggcatacacttgtaaatggtggtgagagaagaggtggagacaagctgttttggggagcctgctggccaggtagcctatttagtaaagttctcagccaaagagatataccatcttagacaaaaggaaaaagaatcctgagcagtgacacatgggattgtcttctaccttttgaataatatacacatatgcatactgttcctcaagtaatagagattggaagaatatactgtatctgactaaattgagaaaaaaatcaagataggtggtggtgcagcccaggaagatgaaaggggggggggagcaaatcagattcagccgtacctgaagccagggattattattaaaggagcaacctagaaatcaaggcatgaaagaatccatccctgacttctgtttagtcttctagtgcaggttgatctgttagtcctatcaatattttcatcctttcctaaagcatttatccaactatgttagaaagtcttacagtccctacctgagagcaggtcagggatatggagggaaaaaatggtggtggctacttaagaacaagagggaaaggaagaatgtgcaacacagccaggtcccatttaatgtggcagaacaggtaacagagggcttctctgcttacttgttttcaaagaagaatctggtgaacattctcagcagggagattgatacataacaattgccctacagggtgtctacaggaatgaaacccccatgaaactcttctatttactcggagtaaagaaaagggactttatgtgcactgtggaaaaactggtgggacatttcaaaaccctcttttggatactaaagcacacaggattgaaaacctttaataaatattgtgagaaagaactcagagagagagagagagagaaaaagagagaaagagagagagagagagagagagagagagagagagaattctgtaaactctaagtggtttacagatgggattgctttatgtcttctgaaaacctggactgatggctttgttttattttcctacagatggaccagcaactcttcagctataacttccccccagaagtggagttccaaacagtgaggtcactcatcctaggcaaagttacaggtttgcttttctattctatatatttcgtagacgtggttaaacttgaggaatttgtcacctctgttggtgtgttcaactgaagacatttctcctgtcttcagtcttgatgcaggctttgaaacaggatatactaaaacacacatgtgccaatgaagcagaatgccactcatgtctgctttattaattggttaatttttactttctgttctctgtatcttagatgtttctgttttttatataatgtgtttttctctcttttgagggaaatgtgtttttctctcttttgagggaaatgtttgttatttttatgtcttaaattccctgaaggaaggtattgatctcatcttgattctcagaagatcattttgctagacagttaaagatatgtcagatgggggagagggaaggggcagaatgtgaacgccgggggaaggagggcaggagagnnnnnnnnnnnnnnnnnnnnnnnnnnnnnnnnnnnnnnnnnnnnnnnnnnnnnnnnnnnnnnnnnnnnnnnnnnnnnnnnnnnnnnnnnnnnnnnnnnnnnnnnnnnnnnnnnnnnnnnnnnnnnnnnnnnnnnnnnnnnnnnnnnnnnnnnnnnnnnnnnnnnnnnnnnnnnnnnnnnnnnnnnnnnnnnnnnnnnnnnnnnnnnnnnnnnnnnnnnnnnnnnnnnnnnnnnnnnnnnnnnnnnnnnnnnnnnnnnnnnnnnnnnnnnnnnnnnnnnnnnnnnnnnnnnnnnnnnnnnnnnnnnnnnnnnnnnnnnnnnnnnnnnnnnnnnnnnnnnnnnnnnnnnnnnnnnnnnnnnnnnnnnnnnnnnnnnnnnnnnnnnnnnnnnnnnnnnnnnnnnnnnnnnnnnnnnnnnnnnnnnnnnnnnnnnnnnnnnnnnnnnnnnnnnnnnnnnnnnnnnnnnnnnnnnnnnnnnnnnnnnnnnnnnnnnnnnnnnnnnnnnnnnnnnnnnnnnnnnnnnnnnnnnnnnnnnnnnnnnnnnnnnnnnnnnnnnnnnnnnnnnnnnnnnnnnnnnnnnnnnnnnnnnnnnnnnnnnnnnnnnnnnnnnnnnnnnnnnnnnnnnnnntaaatgccttctgagttgctttagagacaggcatactgcctcatgactgctaccaatgaacacttctcccagctctgcatctatggtattttggcaggagctagaaactgtttatatgaggagagatcactctgaagatatgacagctgtgcaccctgatactgccattcttcttatgaccagatttgtagtgcagaaatggcaatgagcacaccccttctctcttgtctccttggtttgaaatctcattacttgtttctaagtttgaaattactctatgcccagcgatacatattttgattgtatgtttgcaggcataagaaactaggtgtgtgctgatgtttgtaattttatatgtctggatatagagttatttctacatttttctgcttgatatttttatacttccccagtatattaattagttcatatgtatctttgtatctagtcacattcagtattcatctttattcattaattctcacattctcaacatatcaactattgattatttcacattctaagtattcaattcagagatctaaattcaaccaattttgcactgtctaattataacctcacatattttacgctcttcaaaaactttactgttataatagtatggattctaagaatattaagcacttaatattttattagtgattgtgtgtgtgtgtgtgtgtgagagagagagagagagagagagagagagagagagacagacagagagacagagagacagagagacagagatacagagagatacagagagagagacagaaagagagacacagagagagaatgagtgcatgccatgagcacttggatcatgcctttggtggttgtttatgggatggatccacagatgggacaggctctggatggtcctaccttcagtctcagctccaaactttgtctctgtaactccttccttgagtattttgttctcttttctaagagatattttcttttatttatcttacatgatttcatagattgcatataatcaaccccccattgctctcttccaccctactttttagttaacaatttcttcttctcaaaactgttctgaatctatttctttttcctatagtgtgatttatttacacttatctgctttatctctactcagggaatcaccaattgtgaggatggcatacctcatactcccatttgcatgaggcaatttttcttctctggtttcccttaaaagctatgtgttaaataaatcaatgacttaataaatacacgtacgttaaatttagtgtctgaaatactaccaacatgttaatgcatatcatatacaataattgtatgcaatgtttaatagaatgttaataaaatttaccaactgcaaagtgggttcctaaaaaaaaaaaaaaaaaaaaaaaaaaaaaagctatcttccttgtgcaaggtctccagacttgatattctcctcacccctactcacccccatcccagtctttaattctgccccctgacttactgcctaggtcttaaaggacctccccgatggccattaaaatgtaggaatgggtggggcacgtggtttagtgagtaagctccattacctaagaaggctaatgagctgtgtttactctccagaacctacaggaggaagaggattgacttgtccaaattttccctgatttctgtacatttgttatggcatatgtgtcttctcattcttaagtaaacatatgtaatttgaaaataaaaacataatgaaagggagccatggccctggggctaagcttcatagtagcacagaaatggagaaaaaaatgatgggtttggacagaaatgaatgtgttagtcgcatgtcacagagggagatgggttcagcagaaatattgcttggccctgataacaaatccataccactacacaatcttagaaaagatagctttgagggacagtttctcctgtaaaataaagatcttcaagcattttttatggtagattctagggggaaatatgtataaaaatttgtctcactttatttcaacaatgtttcatttcaaagcccaaaccaaatttattcactttctttctgagaaaggaaggagaaatatactgtcctaaagtctagtgaatttgcatatactctgtaccagcccctggttctttaggcaacatgataaatggaagagattattttctgagggattcttagttggagatattaacttagaaagagagcctatgctactgtccacattaaaactgagatggggctggcaagattaaaatcagaaaagacaatgtatgaagtaaaaagtaagatgttcttttcagggaactatgaactgtgaaaaggaaaaattaaccttgattaagagacaagacaggaaaagcaggttacagcttcaggaggaactgagaaatatcttagcctaactgaaaaaagaaaatgtatttgagaaacttttaaatttctgtgatattcttttttttttaatctagcatgtgtatgtgtttctcccacccttcttctccctcttcctctccctccctccctccctctctttcttcctctctctctctctccctctccctcctccctcctccctcctccctcctctctctctctctctctctctctctctctctctctctctctctctctctctctctctctctctctctctctctctctctctgtgtctgtggctggtgttctggtgtacttgtagagactggaagtcttcctttattactcttcatcttgctcaacaatattgttagttttgctggccagtgttctctgggaatcttgtctccacattctgaacatggaatgaaagaagatgttcccatgtgcccatccaacacttcatttttttctggagacccataaatcctgtcctgacatttgcaaatcaagtctgagtcacgtacatcttgatgtatcacagccaattcttcagccccgcttgaccactccatagattttgagtttaaaacatgcaatggcactgatagattctataaatgactctcaaattttcctttgaattttacaagccagacttctctcatctgcccttctcctaacactctttcttataagattcaacagaacagcccatcaagcttttgacaaacttaaaagctcttctaattcaaaatttcacaatccttcttcctcaaatccttcccaaaaatcatgttcaggtctatcacagagataccccacaatcctgatcaattctcttttagtcgttgttactattgtcataatgaaatactatatccaaaagcaatctgaggggtgggccattttacacacattttaatatcctgatcaattctctcttagtcattgttactattgtcatcaaaaaatactatatccaaatgcattttgaggggtgggccatttcacacacattttaatataacagttcatcattgaaaactttatggacaggaaatcagtgtagaaatctggaggcaggaactgatgtggatgccatggaagaatactggttatagttttatttctcatggcagttcttgcctgcttccttttttatagaacacaggaccaacacccaaggaatcaagttgaattaccaataatggggtggtttctgcaacatcaattactaagtaagaaaatgccgtataagcttgcctaaagcctggtcttatgatggcatttcctgaattgaaacttctttctcttaggtgattttaacttgtgtcaagttgatataaaaactagccgtgacaacacgttagtctaatacaatacttagcctaaatacaatatttagttttgcttcatgcagcagacatacactttacagcatagatgtcaatggtacattgattgcaaatacagttttcctgtgatgggagtaagagttactactgtgctccgattagaggcagcttttccatgattggattaggcctgcatacttgtacttttccttggtagtaaaggatgttttctgtggctgacaggaattatcattagcatgactactattgatacatatttcaagtcagttatcttcaaacaaaaattacagatcatgactttgagacacataacggtagaacataaaaaccaagcacaaataaaaacattgccataatggtacattatataatatatatagtaattcagtgcagaggtgtcggtatgtctatatgagtgtgtagatatcattcttggaacaggagcagtatgtcaccttacaaagaagcgaaaaaccaaacttgagtattcagtaagagcagtatgtgctcataataattgaaacatttctttggtgccatatattctgtttaatttaaaaattacttctttcagaagaacatcatcagttgaggtaaagttgaaaatattaatgtttttcaaaactttgtagtgtttttgtaggcttttttcctctaaattttccttcattatccccaaataatagctctagtacaaatggaatatatttagcatactaagattacaataaggtatgtattttcattattattattatctataatatatagcttgaggtagcaaacttatttcttagattaactcaaattttctcacaattcaaggggtaaatattatcattactaggtctttgaacattgagttggatgtggagaaatgactctgtggataaagagtcattgcaatgtaaacaggaggaatgaattcagatacccagaatccaataaataccaaggcatataaaaggacatctctaaacccactgttcttctgcagtcacggactacaggttcctgacttctgaggtcttgaatgcagagtcagtgagagacatcacctaaaagcatatgataaattacctccttttaaatagctggtcttatagaagaccttagtttggttcaaagaacatatatgtctcacagtttacaattgtgtgtaacagtagctccatggtatctgatgcctcttctgactttcacaggcaattgtttttttagacacacagacattgacaaagaaataatgataaataaaaggaacatttaaaaatatggtggagaatgattaaagactcctgtcctcgagttttgtactcacaggcaacacatctgtacgcatatgctccttcatacatacacacctgcacacatatgcatacaactaacagacacacacatgcaagacaaatatagagaggttgatagggaatgaagggtgaggaagtggaaaaagggagggaaatgctaaagggaggcagggagaaaagggaggaaagggagaggagagggagaatgaaagtgaaacagaaaccgagtcacctagtttaaggacttatccaatgactccagtgtagtagatggtagagctgacatttaaaggcagtgacttaagcttcctggtcaatcctgcttcatttcagttattatgttataatatccctaactgtaaatggtatatctcactggtccacatattcttttctggctgagagctccttcataaatggcttcctcttcagaaccagtgggataaatcacccatgtagagtagggctttaatttgttttttatactttttattaggtattttcctcatttacatttccaatgctatcccaaaagtcccccataccctcccacccactcccctacccacccactcccactttttggccctggcgttcccctgtactggggcatataaagtttgcgtgtccaatgggcctctctttccagtgatggcttactaggccatcttttgatacatatgcagctagagacaagagctccggggtattggttagttcataatgctgttccacctatagggttgcagacccctttagctccttgggtactttctccagctcctccattgggggccctgtgatccatccaatagctgactgtgagcatccacttctgtgtttgctaggccccggcatcgtctcacaagagacagctatatctgggtcctttcagcaaaatcttgctagtatatgcaatggtgtcagcgtttggaagctgattgtgggatggaacccttgatatggcaggctctagatggtccatccttttgacacagctcaaaactttgtctctgtaactccttccatgggtattttgttcgagtagggctttaattaaggagcaattttgatataaggaaaaggagagggagatggaaaaggaaagggagagagaggaactcatgtattatagtcagcccttgggtttctatcatcactccctgctagctaatgtaacatataaaagtggcctgttctgtgaacgtaggtgttcatgtacatggtttgctttacttgtactaaaacctcagcataagtatcacagcaattttgtgattgtgatcctgttgatatgagaaggctctccatctactttggctcaatagagagtgatattgacccttaactatcatttaaaactaggtatttgataggggagataacatgactcctgccatttacataattaaactttaatttcactctctctggatggtattagagaggatgtaataatgtattacctctaattaatgattagttaatagtggaagtgcagaataggcaatagtaaagttctgatcattaaaacttcttacaatagttgaacctgagaactagagattaagcttgattgactgatgatatatacctctggcctccttacttacatgcatacaaaacacacattcaaaactaaacacacacacacacacacaaacacacacacacacacacacacacacacacacacacacacacacacacatacccacacacacatatggaaaagaaatggagagtgtttagcatccaggaaacactaacttttattcttagtaattcataaatggtatatagagatataaacctatattcacaacactcaaaagggagcaaattatgtaagaaattaaatgtcaatgtctacctcagttacctcaggtacagagagacttcatgaaccctgataatcatatttgatattatttaagcttctctattatgtagcaaagctgttcatgatagattctaaaagtgtgtttatgaggctagtataaaagtcatggaatctactctaatgtttgaagatttcagacattatttccccctttcttagcatgctatagttgttaagctccaaatggaagaccagatacttcattatggatttattctcttactaatgttatattacttccatcacatactgatttatattattgtcaaaaatatgtatgggtatgtatatgcatgtgtgcacatatgtgtacatgtgtatgaatatgtttatgtatgtgtgtgcactgtatgtttaagtgggcatgtagtggtgtgtttgttttatgtatgtatgtatgtatgtatgtatgtatgtgcttgtaaatatatgtatgcttgaatatgtagtgagaacatgaaagtcattatattctatattaactccctctggtatagtgtattgctctgtacccaggatcttaggtctttaggactatctatacacatctttattttatagtgatacatgaacattaggtgaaaaccaaatgaacttggaaataaatagctctgggtcaaatatttgaaggtcatttgacaagattacttaccactaatgtgtcttctgtaatgagtaatattgattacaaacttgacagtatatagaattgcctaaagagacaaacttctgtatatgaccttgggggtaaataataaactgagttcattgaagtaggaagactcatcctgaatgtggacagtactattccatggatgggactttggacttaatgaaaaggagatagtgaggtgagcaccagcattcatctctctctgcttactgagagtgcaatgagcccaggtccttcatctagaacgtctctgccataatagactgcatcttcaatctgtaagcacaaatttaccctttctttcttaaattggttcattacattaaacaataaatatctaatacaacctctatgtgcctcattaataccgggatggtgattgccccttactgcatttgtttaatggtagatattcttgtgtataaactgtggagctatgggacacttcatgacagatgttgttcctaagctccaacaatgctgccttcctttcgtctttcttgctaacatttctcttcctgaccagggacactgctattgacttgtttgcccattgcttggggagtcagacgtagtcttgtaaatgtcaaggctgacagggcaaggaactgaaaataattcttataagagtaaacaatttcttgagcaactttggagggtcccatcaaagtgtgctgatttagggcacacatgacagcactttatatgactgctgtattaccttgcttccttgaagctctccagtcttgttctgttgatctacaatggagcatctgatcataggaagaaataataaaatcagcttaccatggagtgagcctgagttgccatctgcagaaaggttacattaattatctcattgttgtgacaaaatgcttgacctaggagactcaaagaaaataggtcttatgttggctcacagtttagtggtacaatctgttatggtagaggagccatggtatgaggattgggaaacaaatagttatagtgtctttgtagtcaggcagagagtgatggatgctggtattcagctctctttcttattcaatggaaaactctggatcagagaaacatgatgcccacagcaggaataggtcttctcacctacatttattcaatctaaaacttcctcctgatatacccaaaggcttgtttcctggaaattctataacgtgttaaggtgaagttgagtgaaaaacaaaatggtgattatcatgctactccacagctgttgaaactgcttgcactccccagcccctaaaccaaaccctgaattttcgcagtattcctctttgtcatttcttacctgctactcccctgagagactttagtctttttctgttatctttcttatccaaatcctttttattactaccatctgatgcacagcactaaatgctttgcattttttccattcatattttatactgtaatccttttcatcagtacattgctgacagagtgcagaaggcaaaggcctgcattaatttcactgattttaaaaatccatacattcctttacagcttctgtgataaaaataacaaaaagtaacttgtgaaaaaacaggcttattctgatttgcagttccatgggaataagagtctatcatctatcatgttagtacatagagaaggcatgacattgggagcagaaagctggtcaatcataatgaatctacaccctcatagcaaaagtagaacaggaagtagagtgatgatatgaaatctgagccttttttttgagtaaagtacttctgcccacgagctccaccttctaaagttctaagatgttcacaaatagcagcaccatgtggaaatggaatgatcactatgggagacatttcacattcagagtaccatagacaccattctggccttatctagactgggatatttttcagaatttaagattatgtgtttcaagagagaagtagactaaggtaagatgggaccgtaggtcaacgtaaatcttgctcatgtaataggtttttatagctgtatggaaatggacttagctgtgaatgtcaactcagctctccccttctctcccccctgactctctctcacagctgtatcttactgctactgtctaggaatgtgtgctctaagataatttagaagatgctagagaaggagtgaaaactaatcaacaagttcatggtcactggtagtccgggaatagagaacgaatagtcatcaaagcttgagctcatttctgttattaaaagtacagttttagtagagaaagaaatttacatgcaagaagctaattacccagaaagttgtctttaaagcttagaggtttctgtctctagtaaaataagagatcaaaaatgacagtattgtcaccaggctactgttgccctgttggctctaggtagaaggcctgactttttttgaggaaaattatcctaccatactacataatgtgagctgtttcctccaagccaagagtctagagctcaagtgtattccatcatgggcttcaggtttgagactaggaagctctgcctgtgtcatctggtctgtcaagagacaacattatcttgtatcttctgaaagttattttggtatattgtgaaagatggcacctgatgccatatgtttgtagagcaattttcccagtatccatataaggctttgctataaaggggcttaaagctaaactccagtttgcattatctttaaataaatcactcatttaatggcatatatatatgccattaaatgagtatacatacacacacatatatatatatacatatacatatgtgtgtgcatgtttgtatgtttttatatgtttatgcatatgtatatttttctgtgtgtttgtgggtatacttatacacttgtctgtgtgtatccctatacctgagtgtataagtcagcatttccttgagtaaatggaatcaaagtgatagattttttttcagtttgaatatgagtgtattttgcagttctcaagcaagggtttttgtacattaaaaaaaaaggaagtattacaactctgaaagatatacttagtgaaacaatcacacatagaacagaaaacgtcatttggcacagtaaaaaaaaaaaaaaaaactcatccaagtagtacaactataaaaagatgtattcagtaaagcagtcacaaatataaaagggaacgtcagtgttatttggcacaatagaaatcatacaagtattacaactctgaaagggtgtattcactgaggcagtcatccaagaataatgacatattcccaagagcaggtcgacacatttttatggtcagttattgattaacatctaatccagatattttgtaaaacttcaaaaaataaatttaaacggttttaaggctttttatttaaggatttctttaccatataccaaagcccacttctgattacgcacatgcatccatatgaaattttattgttgggaaaggttttatctatcataatactattaagtaattttgtaaatgatttatgaagtaaagaaccgtgtttcctggagataagatcatggttggtgagcccttctcaagggatgatttctaacccatttttctcacctaagatcttcacctaggctatcaggactatgttgtatataggaaaaggaataaaataaaataaaacagataaatttatgaaaactacagctcaatattttgtttcaggcaagagttccacaaccaggtccaggagacctccttttgaagtttaagcttcagtctgtggaacttgtcatacagatcctactggagttgctgttgcaaaggaagaatactcaatgtaactgtggcttcatagaataaacggggtagtgttccttctgtttctattttgtggaatagtttgaagagtactagtgctaattctttgaagatagaattctgctctaaaaccatctagccctgggcttttttgttctgttttgttattttggttggtagacttttaatgaatgcttctccttctttaggggttaggggactgtttaaatggtttctttgatgctgattcaaccttgctatttgctatctgtctataaaattgtccatttcatccagattttccagttttgttgaatgtaggcttttgtagtatgatctgatgatttttttaaaacaaaatcctcagtttctgttgttatgtctccccccaccttcttttttttttttttttttttttttttttttttttttagacagggtttctctgtgtagccctagctgtcctggaactcaatctgtagaactggctggcctcaaactcagaaacccgcctgcctctgcctttcaggtgctgggattaaaggcgagtgccaccactgcccagctatgtctcccttttcatttgtgattttgttagtttggattcagtctctgagccctctggttagtcttgctaagggtttatttatcttgttgattttctcaaggaaccagctcctagttttgttcactatttctatatttctcatttctacttggttgatttcaaaacagattttgattatttcctgctgtctactcctcttggatgtatttgcttctttttcttctagagaatcaggtgtgctgttaagctggttgtgtatattctctctagcttctttttggaggcactctgagctgatttttcctgttagcactgcttttattgtgtcccataagtgtgggtatgtggggctttcatttacattaaattctaaaaagtcttttatttctttatttctcccttgaccaggttatcattgagtgggacaatgttcagctttcatatgtatgtgggctttatgttctttttgttgttattcaatatcagccttagtccatggtgatctgatattgcacatgggcttattttgatcttcttgtatctgctgaggcctgttttgtgaccaattatattgtcaattttggagaaggtaccatgaaatgctgtgaaaaggtgcattcttttgttttaggatgaaatattccatagatatatgctaaataaatcttgtccctaacttctcttagtttcaatgtgtctctgtttagtttgtgtttccatgatttttctattgagagttgggtgttgaactctccccactattattgtgtgaggtgcatttgatgctttaagctttagtagagtttcttttatgaatgtggatgcccttgcatctggagcacagacttttcagaactgagagttcttcttggtagactttttcctatggtgagtatgaagtatcctttcttgcttttatttgatattacaatggctacaccagcttgtttcttgggaccatttgattggaaagttgttttccagacctttactctgaggtagtgcctttctttgataatgaggtgtgtttcctgtatgcagtaaaatgttgactcctgtttatgtatccagtatgttattttatgtctttttattggggaattgagtctattgatgttaaagatattaagaaatagtgattgttgatcactgttaattttgatgctattttttgatttgtctagctatcttcttttgggtttactgaaagaaagttgtgttcttgctttttctaaggtgttgtttgcttccttcttttgcagtttttccatctactatcctttggagggttagaaatatggaatgatattgtgtgaatttcattttgtcatggaatatcttggtttctttatctatggtaactgagagatttgctgggtatagtagcctgggctgccatttgtgttctcttagggtttatataacagctgcccaggaccttctagcttttatagtctcctctgagaagtctggtgtaattctgataggtctgcctctgtaggttacttcacctttttttgcttactgcttttaatattctttctttgttgtgtgcatttgatgttttgactattatgagatgggaggaatttcttttctattaaaatctatttgggattctgtaggcttcttttatgtttatgtgcaccttttctttttattttgtggaatagtttgagaagtattaatattgggtctcctttgaaggcctgatagaattctgtactaaaaccatctagccctagtgatttttgctttggggtcctttagtgagtgtttctatttccttatgggatttgaggctgtttaaattgtttattaacttcaagacctgatatctgtctagaaaatcatccatttcatctagattttccagttttgttgtgtataggcttttgtactagaagctgatgattttttttcccagagactctgttatgtctgacttttcatttctgatttggttaatttggatactgtctctgtgccctctatttagtttggctaaaggtatatctttcttgttattattttttttccaaaaaaaaataagctcctagttttgttgattctttatatagttgtctttgtttctacttagttgattttagccctgaattagattatatcctgccatctacttggtgtgtttgcttctttatgttgtagagcttttaggtgtgttattaaactgctagtgcatgatctctccaatgtctttatgaaaactctcagagctataagtttcccatatgactgggtatgttgtaacttaatattggttaaacacttaaaagtcttttatttcttctatgaccaaggtatcactgaatagagagttgtcagcttccatgtgaatgtgggcttttctgttgtttttgttgttattgaacaatggccttagtccatgatggtactatagactatatcaaattaattcaatgtccctgtatctattgggttttgtttgtgcacacttatatggttaattttggaaaaggtacaatgaagtgctgagaagaaggtatatttcgtgtttgtttgtttgtttgtttgttttcttatggtgaaatgttctgtagatgtctgttaaatccatttggttcataacctctgttagtttcactttgtttctgtttagtttctatttctgtgatctgtccatttgtgataatgacatgttgaagtctcctactgttactgtatgatgttcagtgtgtgctttgtgcttcagtaatgattctttcacaaatgtgtgtacccttgcatttggggcataggtgttcagaattcagagttcatctgggtggatttttcctttgatgagcatgtagtgtcctttctcatcttttttgataacttttggttgaaagtctattttattgtgtattagaatagctactcctgtttgcttcttgggatcattttcttggaaagttttctggaggtgtttcctatatgcagcaatatgctggatcctgtttacacatcaagttcgtcagcctatgtctttttatttggaattgagtccattcatttttgagagttattaaagaccaataattgttgtttactgttattttatttttatttttttggttagaaaagtggaattatttttctctggttttcttcttcggggtatgttttgagatttcttgttttttttgttgggtatagtttcccttcatgtgttggagttttccttctattatcatctgtaggactggattagttgaaatatattgtttaaatttggttctgttatggcatatatcagtttctccaactatggtatttgagagttttgctgtagcctgggctggaatttttgttctcttatagtctgtatgctatctacccaagatcttctgacttttagaatctctgttgaaaattccggtgtaattctaataggtctgcctttatatgttacttgacattttccctttccgttttcaatattctttctttgttttgtgtatttgatactttgattattatatgacaggaagaatttattttctagtccaatctgtttagtgttcagtaggcttcttatatgtttatgggcatccctttttttaggttatggaagctttccacaatattttggtgaagatgtttactagtcttttgagttgggaattgtcactcttttttatacctattactgttaggtttgttctttccattgtgtcctacatttcttgaatgttttgagttaggatcattttgctttttgttttttctttgatgattgtgccaatgtcttctatggtaggttctatgcctgagattcttctatctcttgcattctgttggtgatgcttgcatctatgactcctgatccctttcctcctaggttttctatctctagggttgttgccctttttggtttctttattgattctatttgcatttttagatactggatggttttattcaattcctttacctgtttggttttgttttcctgtatttctttaagggatttatgtgtttcctctttaaaggcttctatgtatttacctctgttcttcagtatttctctatgggagttatttatatccttcttaatgtcctctatcttcttcatgaatgggatttttgatctgaatcatgttttcttcaagtgtattggggtatgcagagattgttgcggtaggagaactgggttttgatgctgccaattggaatttgacttctgttgcttatgtttttgctcttgcctcttgccatctggttatctctgatgttaattggcctttctgccactctttggaggctatccctcctctgagcctgtgattcaggctgtgtcagacatcctggttgtcaagctaactctgtgaatgggtgggttgcggaaggctgcagcacatgctccaatcctgggcacagatgcacctgaaggaattctccggctgggcaggggttcttgtgtcccctgagaaccaggacatcccagttagaccaggtcttagggtggagattgaggcctcacctgtgaatctggatgtgtcagaactctgagaggtcaagatgactcagggtgtgggatcagtgggtagggatctagagcacaggatcctttacagactcaggtgcaaactggacatttagtgtgtctctggctgggcagcagttcctgtgtctgtatccctgacggtatgagttaggtcaggtatggggggtgtcctcacctgtgatcctggatctgtcagaactcccaggtgttaagctgtctctctctgtgggctgtgtgggtgggagtcaaaatgtctcattttcaatatcccaaatgaacttagaaaatggctcaatccagatagtagtgtagaccctgaaaataagttacaatcccccaggttttaattgacatatgggatgagtcagaatcttctactttgtgtgatcttttgcatgtatatgtatacatgtatatgcatacatgtgtatgtatgttcctacatgtagaggcaagaagaatactagttgttgttcatttttcttactcattttctgagacagactttctcagtggacctggagctcactgattggctagactttcaggtgatcaagtcctagttataccactgtctccacccctcataggggaatcacatcctctactcagctttattcatggttcttgggatacaagctcttgcacttcggtggtgatccctttactgattcaaccattttcccaacccttcttttattgttctatttcattcttgtggtgcctgagactataagatctctacagtcaagtctaagactgagatggccttagagggacctccctgaagtccattgttcagagatgcccattaatgtaggcacactgctatgtgaaagaattaatcactgttgtttagattttgtacaattgtctgtgaagtcccagttcaatgcagctattatagcttatttgcatcctgtacagtgaactgctactggggcatgcaatgctctacttttattcatatactttaaaaaagtcagaaacaggaataaatgagttcttggcccctgcttagatctgttaaatcaataaaaaatgcctgaggaggaggaaaccttattttaatcttcaatccaaagggtggattctacagcctcttttaaatattagcataaaccctcaacattattttttctgtggaaaataaaagaatatgtcctgagggtgtgaaaccaagaaatttaaaattaagtcatattgctaaagtctttgcaatttagcattcacatccagggaggtgccattctatgatgattgttgccaggaaaccaattaacacgtgttcaattattcaggcagtgaattgttaagctgaagtaatggattcttaaatggtagcatttacatttttaaattataattacataatttctcctttccctttcctccctctaaaacctccagtataaccattttttctgtcttttgaattcatggccttgtttttttattagttcttgttatatgtacaaatatatattcttaggtacataaattcactttactcaacctgtacaatgttacttgtatggattttcagaggtaaccagttggttttggttttaaataagcaattcatgtgttcttccttgagaaagcatttttctcctggtctcagcatttcttagtttcctatagttcaatgtgtgatgtaacagagttttaggcttaaccccatctactttagcatgtctatacctataactattaagttcatgtttaagcactcatgttctcaaactttattgtagaaaatttctacctaacttctgattttttttcctgtttgccttcatatatctcatctatctacccatttaccatctatcatctatttgcctacatacataaaatttttctactgatatatttgtttagatatctaattttaataaacaattttaagtatatgacttatgtaaggcctactatggtctaggccctatgtaacaactagttctttgaacacctaaaatgtttatttaccaatctctgaacaaagattgtatttttaaagaaatttcataattttctcatagaaattattgaatataatagtacataaggcataaactaataaacatacacacatacatagagatatatacatacatacatacatatatatacacatatacgtgtgtgtgtgtgtgtgtgtgtgtgtgtgtgtgtgtgcgcgcgcgcacgtgtgtgtgtgtctgtgtaggtattaggggaagaaaggaaggaacattagaggcatacaaaaatcatgagttgtgggtagaaagttggaagttcacccattaggaaagagcattcaacctgccataccgaggaagacatctggcatatcatctgtgaaaggaccctccttggaagcacctaaagattctaggtattcctccttacttgtaaagtattttaaatcattataaagagaacagacaatgacatttgtcaatcagcccaacatgttttcctaaattcaaatacattgttcattaagctttaggttacagaaggtccaggatattgaaggtaaatgttctatgttcagtcttagaagagctccgaagaaaccaataaagttgaagaaagaacataacttctttcataaaggaaagttccagatgacatgccattattatggaagtaaaattaaaaatccatgttttttattggccagattgaaagcattttagatatacttatatatgttttgtcataaggctacatatcattaatattacgaaatgttcttttgtttttgttttcttcccattatttccctttatgagggttaaggaaactctacttcttcatcgtgacactttggtactagctgagagaagaactgagaaggacactcttcttacaaacagaaagtagattggcatgatggtggagtaaaatcagtgcaatgaatgggtataagaaaagtggcttgagagaagaagaatctcatttccatatgcctacttatctcttcaaaattttctcttgcctttttaattcttccttatgttctttgtttctttgttgtttatgctttgcttcatttcttaaaaatttctaatattttatcccccccccctttatttcatgttttaaccacttacctagttagcatcagtagtcaacttggcagtcctgaattatctgggaatgtctcacttggaagattgttataatcagattgccctgtttccataactaaaaaatgtttactgataattgatgcaggtgagtcccgcccactctggaagacaccactcctagataggaatcttggggctccattagaaagttatctgacaatgagctagaactcaatggaaaatgtgaaaagttaagcataattcctttatagtttctaattagaggtcctatcccatgttccctcaatgacagactgaggattgaaaagtaagccaattaaactctttctgtcccaagttgcatttggtcattgtgtttatcagagcaacagagaacacaactacaaatacattagctcaattacatccattccaagtcagttaggtgctttttgtgctagatacaatgaacttctcttcatcttagatagtagcacgaagactgaaaggcagctgaatcactgagaatctcacctcatccagaatgatgactcatgaagcctacacccctcaaactctctatagatatttcagggagtgtgctttgttggaaagtctccttgccctgttgattgttatcttatgaatcttttaagtttcaggaaattcatagaaatttgtgctaatttgcttcctgaactttacaagctttatttatgtatttagtctcaaagttccccttccaggaaagaaatgtttcaaatatgaaaaaggtgttgcatcctagtgcttcttttttaaataattttattaggtattttcctcatttacatttccaatgctatctcaaaagtcccccataccctacctctcactcccctacccacccactcccactttttggccctggataccagtgcttctgaaactgagctatgggccatatatactacaattacctaattatttatttttaaaaaaatctaaatgtttttccttatttttggatttcatgaatgtttttgttccacagcattatttttactattcaggttttttatccaaggggaaacttagttgttgtactattatactttttttctagcctagtgaattccatatatgtatataatgaaatgtgatcacattctcacacttaaatgctcaaattaccctcatatgcctacagcacaccactttccatcttcatgtgggaagagagacacatcttttgaggatgatcactggtaggtttgtttgctccagtggaagacccaagcacccaacacttttcatatcagctcactgtttgcacaacaactgtgaaatggagtttataaatgtttctggaggagattacatattggatgccacccctgcactacatgtgccaacattcctttctgttgttttgcagccagtcatctctcttaactgtaagatatattgtctgaaatcattacttattagggagatgggaaacatgcagagaagagtgcttgtctgagtatccttctctactactgtctataacttatttccttaggacaggttctctcaaggaacctgtagtaaactttcagcaagcaagttccaggaatttttttgtctctatttatgccacacacccaagccagaggtgtaagtataggtgtccatacccatgtctagtttttatatggatactgggcattttaacttagatctggctgagctatcttcccagtcctaatgcttgacatttcatctagttaacctttcactttgtttcagctctagtgaattttagaggtaaaccacttgcttgtattttctgctcatgtcttcatttacaacagctccccctatttatatcttaacctggtataacacttttcttttagaagccagtgctataaggccctgcttggcttgtttttatgacatttaagggattcaaatattataaatgacttttgacatatagcaaatatcacattacattccagaactgaactgttttgagcacatttttcgacttatttcgtacttttaaaagtaatactacattccactaaacctgcctgaatagttctgctggattagatatgttcctctctcgttgtcaaaaactttccacctgatgattgtgtattcaagataagattgatatccaaattctttctctggcttttaaaatctgatggaatatttataaattaatgtgaagattgaggaattcataaagaaggagctggagaaaaggttcagtgcttagaatttattgcttttacagaggatcctcagttcagtctaaagcactgaggtttgatgaataagggacctgatgccttcttctcttctctgagaacacagtcaaaaacatgttggtattcatttagcacacatgcacacacacacacacacacacataacgaataaaagtaagaacaatagaatctttagaatggctgaagaaattagtccttagtaacttatcaactgagtcattcaacatttgagtaacatgtattcaatggcaaataattatgaggtgaacatttccttcaagtataacacctcttgcgtttcaattattcaatatattgaaaggatattgaaagtagtcaaaggaatttggaactgatatacaatagaaacaataatgataatcacatatctcacaccacatcattaataacatgcattcactctgggaagatgttaatcaaaatgcaaaattttgatgctagaaattagattctgccatcttttgtatgtaagtgattacagttatttaaaatattgatgctagaaattagtttctagcagaattcttttgtatgtatgtgattacagttatttaaaatacgttgtgagtaaggcgtgttgggaaatacctctcatttaaatatctgggtgagtgtggcaagggaattgtgtttcaagctagtctgaagtgtctactgagaccttgtctgaaataaacaaactatcaataaatagatccacaaagggaatgttctattcatttggaatgaattgaaagaatgtattttaggtgttcttataatcagagaaagaagggagtatgagatatgaaaataatcatatatagtgtgtatgtgcagtcaaataggcacatggagtagacagaaggatagtgattcctatcctctatggttttccaccacctccccttgagaaagtcggtcactgaaccaaaggcttgatatatatatactgcactgactctcctgggaactcccaggatctgtcaacatacatcccccaaattacagtattacaggaacagactgttgactgtcatgtccaacttcttttatgtgaggtttgggaattcaagcacaactcttcaagcctgtgtaataaacacacatatctaaaaaactacctgcccaaacatgatgaagatattaaatagctccattttgctacttcataacacataactatattatgttggacaaaataaatgtttataggaacatgtaagcaaatataataactgcaaaatgtgcctatgggcactgagctaagatttagaagtttattattatttttttattattgttattattattattattattaatttacctaaactttgtggcagatacaatgacaaatggttaatagtaggcaaaatcaaaactcgaaaacacagaaggaggtcatatatacagcagcaaaatttatctgctcagttttacccagagtcgttcctgtgctgaattagtgacttccccattaccatttcagagggcaggtggaactttaatggaatgagaaactgttatttgttagtatttaaactattgtctgttagtacaatgtccaattttctgagaaaccgccagactgatttccagagtggctgaacaagcttgcaaccacaccaacagtggaggagtgttcctctttctccacatccttgccagcatctgctgtcagttgaatttttgatcttagccattctgactggtatgagatggaatctcagggttgttttgatttgcatttccctgatgattaaggatgctgaacattcttttcaggtgtttctcagccattcgctattcctcaggtgagaattctttgtttagctctgagccccattttttaatggggttatttgattttctggagtccaccttcttgagttctttatatatattagatattagtcctctatctgatttaggataggtaaagatcctttcccaatctgttggtggcttttttgtcttcttgacggtgtcttttgtcttacagaagctttgcagtttcatgaggtcccatttgttgattctcgatcttacagcacaagccaatgctgttctattcaggaatttttcccctgtgccaataccttcgaggcttttccccactttctcctctataagtttcagtgtctctggttttatgtggagctccttgatgcacttagatttgaccttagtacaaggagataggaatggatcaattcacattcttctacatgataaccaccagttgtgccagcaccatttgttgaaaatgctgtcttttttccactggatagtttagctcccttgtcgaagatcaagtgacaataggtgtgtgggttcatttctgggtcttcaattctattccattggtctacttgtctgtcattataccagtaccatgcagtttttatcacaattgctctatagttaagctttaggtcaggcatggtaattccaccagaggttcttttatccttgagaagagtttttgctatcctaggtttttttgttattccagatgaatttgcagattgttctttctaattcattgaagaattgagttgggattttgatgggaattgcattgaatctgtagattgcttttggcaagatagccatttttacaatgttgatcttgccaatccatgaggatgggagatctttccatctcctgagatcttctttaatttctttcttcagagacttgaagttcatatcatacagatctttcacttccttagttaaagtcacgccaaggtattttatattatttgtgactattgagaagggtgttgtttccctaatttctttctcagcctgtttattctttatgtagagaaaggacattgacttgtttgagttaattttatatccagctacttcactgaagctgtttatcaggtttaggagttctctggtggaatttttagggtcacttatatatactatcatatcatctgcaaaaagtgatattttgacttcttcttttccaatttgtatccccttgatctccttttgttgtcgaattgctctggctaggaattcaagtacaatgttgaataggtagggagagagtgggcagccttgtctagtccctgattttagtggaattggttccagcttctcaccatttactttgatgttggctactggtttgctgtatattgcttttatcatgtttaggtatcgccttgttggatcccacaatacctctcctgggcatatatccagaagatgttccaactagtaagaaagaaacatgcttcactatgttcatagcagccttatttataatagccagaagctggaaagaacccagatgcccctcaacagaggaataaatacagagtgtggtacatttacacaatgcagtactactacagcatttaaaaagaatgaatttatgaaattcctaggcaaatggttggacctggagggcattatcctgagtgacgtaacccaatcacaaaagaactcaaatgatatggactcactgataagtggatattagcccagaaacttagaatacctaagatatgttactatttgcaaaacacatgagactctagaagaacgaacaccaaagtgtggacactttgccccttcttagaattggggaacaaaacacccatggaaggagttacagagacaaagtttggagctgagacaaaaggatggaccatctaaagactgccatatccagggatccaaccaataatcagcctccaaatgctgacaccattgcatacactagcaagatttttctgataggaccctgatatagctgtctctagtgagactacgccggggcctagcaaacacataagtggatgctcacagtcagctattggatggatcacagggcccccaatggggaagctagagaaaatacccaaggagctaaagggatctgcaaccctacaggtgaaacaacattatgaactaaccagtaccccagagctcttgactctagctgtatatgtatcaaaagatagcctagttggccatcactggaaagagaggcacattggacttgcaaactttatatgccccattacaggtgaacaccagggccaaaaagtgggagtgggtgggtaggggagtgggggaggnnnnnnnnnnnnnnnnnnnnaatgtaaatgaggaaaatacctaattaaaaaaaaaaagaaaaaaatgtattgtctggaaactcacactatttctaataaggcagttaaaaacatgggttctattattagtattagtattatttattattagtattattcatagctttctttgatttacaaagcagtacacgtgctatggaaagaaacctcatggttctccttgcttcagtagaggtcatgtgtattcagaaatattgggaacagagcataaaagtgatatattttggtggtatattttagatccctatgcttatgtgaaggcacttttatctgttaaaggtgtttttgatcttggttttccaggtcatgacatcaagtagttattttttccctagctacatctgagtcaaaatatattaccaaatatatcagaccatcaatgtagatccctgtgaagtgtgaaaaattcttcaaatatctgagttcatttggtgttgtgaaattatttacatattttatgtaaaattctttcacaacagctcctggagttctgatgacatctcctcccttcttgtaggcactgtgcttatctgcacatgcaaacacacacataaaaagcattaaaatagattcatgcacatctatctgcatatataaacacacaaacacatatgatacaaataaaataaaatcctttaaaattaaatatatattactattttctgtggtaatgaatattgaaaaattgtaccctttcacttatttggaagaaatagttatgtttttactactcacaagtttataattcaatgagagatgaaaatgttttaaattatcctttgtagtttttgttttgtttgtctttgttttcgttttactatttcatttttgtaagcatcaaatatataagtatgtggccctcaaacaaaacacgcatttatttatttatttatttatttatttatttattaacttttatgggtgtgtgtttatgtgtgtgtgtactcacatgcaggcatttggttctctttttcctcattggggttttcaaatataactcatattatcatacaggataagcattttttaaaacagtgatccctattacataactctgtcttcataacaattcttcccttttctaaaaccttttgttatctgttgatttagggtttgtgtagaataaaccgttgtgaaaaaataagaatatttcacacaactttcctttaaagaaagaatgtcactttctcacatttcacccagtttctttatattcctatttttgtataaaagcttttacttgtgaaaatttcaatagtagtaccattcttggattgctgaaggcttccttctagcaatatctgtgaatgaaaataagctttcttgacttggaccctgaaggcatagttcaatgaattatcactttccactgtttagaaatctgtcagcacaaaaatatcattccagtttacactttgcttctcttgcctttaacttctttttcatctctgagatttaattttgttcttcattcactacaaataagtaggtaacttcactcttcacttctttttctttttccttttttaaattagagattttcttcatttatatttcaaatgctatctcaaaagtcacctataccctcctgccaccctgcccccctacccactcactcccacttcttggccctggtgttcccctgtactggggaatataaaatttgcaagaccaaggggcctctcttcccaatgatagccaacaagaccatcttctgctacatattcagctagaaacatgagctctgtgggtactggttagttcatattgttgtttcacctatagggttgcagaccccttcagctccttgggtaatttctccaggtcctcctttgagggccctgtgttccattctatagatggctgtgagcatccaattctgtatttgccaggcactggcaaagcctcacaggagacagctatatcagggtcctttcagcaaaatcttgctggcatatgcaatagtgtctgcatttggtggctgataatgggatggacccccgggtggggcagtctctggatggttcatcgtttcatcttagctccaaactttgtctctgaaactccttccatggatattttattccctattctaaggaggaatgaagtatccacgcgttggtcttccttcttgattttcttgtgttttggaaattgtatcttgggtattctaggtttctgggctaatacccagttatcagtgagtgcctatcaagtgacttctgttgtaattgggttacctcactcaggattatatccttcagattcatccatttgcccaagaatttcataaattcattgtttttaatagctgagtaatactccaatgtgtaaatgtaccacattttctgtatccattcctctgttgagggacatctgggttctttccagcttctggctattatagatagggctgctatgaacatagtggaacatgtgagattattaccagttggaacatcttctgggtatatacccaagagaggtattgctggatcaactggcagtactatgtctagttttctgaggaactaccagactgatttccagagtggttgtgcaagcttgcactcccaccaacaatggaggagtgttctttctccacatcctcaccagcatctgctgtcacctgaatttttgatccttgccattctgactggtatgaggtggaatctcagggttgttttgatttgcatttccctgatgattaaggattttgaacatgtcactcttcacttcttaccaatcaatggctatttatatgacttggcaattattttcacggctgaggcatctcctcaatctagatagttttaaatgattttgatgaaaccattgtagacacaaatgtcattaggtataaaataaagaggtaaagaagaaaatcatatgccgaagtggtcatgaaaaaagtacaacgaaatgagacaacattgcttattatggagacaggcaaaggaagctaggaagtaaaatgaaggataaaggagctggccatgtgaaagaactatactttccttcaaaggatccacaacctgatgatactgactctttgattttaagccataaagatgctgctaaatttccaaactacagaaataaaaaaattatcagtatgtaactgaaattatttaaacttccaccaatgtgttatactcaacacatgaaattatatgggctgttattggttttacatataagaaaggacaaatgaaatgctggttttgtttgtttgttttgttttgttttgtttagattttgattttatgtggatgttggaggtaacaaagcaagagtgggacaaaatttaatgagagcagagagaaagctccatgattaagagcatttgctgttcttgtagaagtttgattcctagtagtaacaaaattaattcttgcttcacaaaatttgatacattctttgtcttctataggtacccatacacaaacacgtgtgtgtgtgtgtgtgtgtgtgtgtgtgtgtgtaagagagagagaaacagaaagagaaaaacagagagaggaagagcaataaagcaaggggggaatacgagggtttttgtttgtttatttgtttgtttgtttttttaagaattaggaaaagtacaaaggcaagaaacactaaaagctattaacatcttttattctatcatactgtcattatatcttttccttaatgctgctagccaaatatatacttagagttcaaggaatgcactattttaacatttattaatcaagataaaattacaatgtatgctggtaaataagaaaattcctgtacctttttcaaaaactaaaagacttctcctaataaaataatcagttgaaccatctagttatgttgaaactattatactttaacaaaaatatagttcattatgcactgtagtttatgtaacagtaccacagcaattttatcaaatgaccctctttgagaaaaaagaatgagacgtcttgatgcaaatgagacatttgatcttactctgaacccaaattattgcatctctatctcttataaagactcaaaaatactccagcaatttgaatatattcgtaggcgaaaagccatctcccaagttaatgtccaatcagtatgatgcagtgatgtgatgtaggtagaaatgtttactcattcagtctacacagcttcccggagataatgaacatgatgcatcttggagagaccagctttcatttttaatcccattgatttcttattattttaccttgttaacaattatgaattaaatattgcaatgagtattgtgatttgattgtgttttaataacctgcatccatagataaatcctgatgggaacaatgataaaaattctttcaaatatctagatttgtagaagagtatgagagaactacattattctttatacagttcataaaatacttgaataaaaaaattgaaacttgaaacatttttacttcaaaggagtgatagtcatagcccatttctgtgagatatacatcttgaatgatatattgatgcctgaagtaaatgtatagttgaaaagagaaagaagataagtaagaatttccttatttaaagaacaatgagagagtttcagctattttagttattaatcaacaaaattacataaagtattttgaaaaaaaagacctatgattctttttattcattgcagaaactcttgggttggatccagaagttgctaaagcaaatacactgggttttgttggatgcctctcttcagtccaatataaccatatcgcaccattgaaggcagccctccgccatgccagcatttctcctgtgactgttcaagggactttgacagagtccagctgtgactccatgatagactctgatgtgactggagtgactactgtttattctccatcaggtacttcccagaggatgctccattgaatatccatcacaaataacacttctgctgttttataactctgctaacaagttttgttattttttctttattatgagtggcttatttcacttgatatatttgtctagtccacaacgttttagaatgagcaagtcaaacttttttgtggctgagtaatattccactgtgtgcatgtgcatgtatgtgtatgtatgtttgcatacatgtatgtgtgtgtgtgtgtatacttacccatccatatctatcatctatcaaccatctatctgccttacataaataagcacagaggttagtcagcaacggaaataattaggagaaaataggatttatggccttgattgtgtcgtttgtgtggtgcaaggctagcaagcttgagccttttaggattggatcttttgaggaacttgatcaaacttgtgctatgtagataatttcaaatggtcctataatggtctgtatggtgtttagaggagagagcacattgacttggggagggtcagttaaataacaagctggttgctgatgaggcagtggacttgcattttctgtgtgttgaaagacatgcttgtaatggggagcatttactgcccctaggagttaattaacataggattgtctgtcactaatcctgagaatatgtgaagaaatatctagtctgcttagatcaagaacagaagacagaccaacctaagatcctaccaaattccaatttgctgaaccactgagtttaattggtgctatttatagagatataagtgattgattactcacaggaatagaaatgactcaaagagattcatctccaaatcctacccaagcatgggtgataacttatataagctgacaaagggaaagtcactggacaatctgtaggcagctcaacagctcagacagggcctctcccaggcagtcttgataatctctgcacatttcagcagccttgttgatctgagactctaccaggtatcttgactgatatgagaatattattaatcagtcctacataagcttggggtaggagggacctactgcttcttatctgtttcagcaacttcctggagtcgttgaaatatctactccctgagtcttaaaaaaaaaagtcgtttagaacattctgtctctttaaaaagtatccctgtagggggcacgtatccattacatgaaaagtgtttcatacctgggaaatacatgcatatcttgaacaagaaagtgttcaaatgagtcaggaaattccggggaaaaaataaagtattagtttcctgttttaactttgatagaccactcttcagctacagagtagtgccagatatagaaaaaataataatgacagtctctatgttcaaattactctttgacactctcagataatgattattttcaaaggtaatgtataggtattgttacatatttcttatgagatctagcatatttagtacagggtgaaagattacacttgcttattcagcaagcaatgtctggtactatacacaaaaatgggagtccttacatacatacatgcaaatatgtatactcagatggtattaattttttgacagagaaatggaagctaggtgaatagataagtagatatatggtatgtagataaatagtaaatggcaaatattgatagatgtatttatgcatttacactaaggaatttatttttggaggtgggaaatttaaagctaagatgtgattttcaaatatcatattcagtgaagatcaatagtgaagaataaatactcttggactatatcacccgtttcataaaggttactttgtagaaagtgatcaacaaacatacttcagaatctattatcttattaaatctgaacttttctttgtagcattagtgaacactcaagtttataaagtaaattcatatctattatcatatcaacttcaaagcatgctagaatggattaacataatgaatatattatttataatgttaaaattagcacataaactaaataaagttggagccaatttgagctgtgttaagaaaaaggaattatatgaactgtggacagttaagatttgagtattcatgaaaaaaataggagttcctggaaggaaccttggcataaaatgtaccagagtaaaaagttgtaagtacataggaggtagtagctaaatgtctggtattcattcctgtcatctccctccttccctgactttttctttccttaccttcttgacattctctctgcctctgcctctgccttactaaatcctgtctggcctcactgtctccctgagatctgttactccatctatactctttactctttcccagttcttccctcccagtttccctctgtctcattcttattccttatgactctgactcctgtctttcttcatctttaaatttttctgtctccactcttctctaacttctttcctatccattccactctttttcttctttccatatcttattccctatcctctttctctcttcttctccccattctcctcttcctgtttaccttacttcctatcttgaagtctctctgtgtctctctctattttttcctctatgtctcccattctctaatacacagtaaaatcaaggttactatatcataagttaaagaccagtaagggatatataagaccctatctcaaaagaaaaattggactatagcaatggctcccaggttaagagcacacactggacatctgttctcatggtgagggcttctccaaggtactaattcttccagtgccttcagctatcctccgatcttctgtagttaatgccactagagtacattgaggcaaagagtaaagtatgtttggagaaaaaggcaactattcaatcccaagaattctctagcaaagtagacgactgaagggaagactgaaagtacttgggccaggcagcagcttcaccagctcaaggctatctcatgacttatgaactaatgcactcataaattgtaagctgtgcattttattcatctttaaatatggacaaagtgtgttcatgtttatgacatggaacctgttgagatgagaggacaaggcagcaggagtcatgtttctccttcatcttgtttcatgggcacagtcttccttttgtttatatgtcacttagatatgagactgactactctctcactaggagtacagtttggatctctagaattcagcttttaatataggttctggcattgaactagttcatatctcattacagcaatgctgttacatttcatacctgtatattgtatatttgctttctgtgtatgactaaatggtaaagtttactttttttgtcttttcctctttcaagttccctttggaaagacagatgagcatgaaccactcacaaatacaatccagagtgactcagcattcattggaggtaacctgtcttcattactaaaagcaggagagatatctatgaccctattctctacagaaagttatttgaagactatgatcatccagaacacagattcaggcactctgtccagcacttagcctcttcatacattacaagattaagagcagatcctccttcagtgccttcatcttgccttatattcagcagggagctgatttctgaagcaacagctggaacatttactctcaggcgggcatctcaaatcatgttcgtttcatctacttgtcacttctaaagcacaaacacaacagactgataaaattatgtgtggaaagaagtcacatttgagcagacagatggacagagctgcagtcattttcagttttcctttactaagtgacttgggttagatctaatgagcaggatgaaccctacacaactgaagttccaagtctagcaggccatctacttgtggatatagagcttgcctgctctggttgtagctcattctccacctttgcttactttactgtatctgagttgactgtcggctgcatcctattctacttttcattctcttagctagtctaaaggctgcagtagtcagtagtttgatgttctgatctgggccttacaatgcaaattatctcccatgattgacttaatataagatgcctgaaatatgaaaatcaattgattataactctagcaggtgtctcacccctgcattctggcagctgggatgaatggatccacaacagatggagttctataaaatcagtaggagtcattcatttcactcccatttaatttgcttccagtctggatcagacctgtattgagtatagagccagaagatgaaaggtaaagttaaggcctgcctagaatgagcacactaggaaggccataggaaatcaggcaatgtagcagcatagaccctggttacaaaggaaaaaaaaaagaaaaaagaactgggataggaggagtccatcacagtagcacaccagagaagcagaagaaccacctttccttaggaagctccttaagatacccatgcgagctgaatgccatgtccagggatgacaattgaacttgataatttttgaaatcagtaaatgtcatagaaacctttgtacttctttttgttcctgtaaattctcaataagaaaagactgtgttttgcccttctgaactcattgacaaactatattgagtctctctggtagtgggaaggttttcaaagttccacaggagatcctgggacactgccgcctgcaataaccccttcaaaccagttgcagaaaaagaggctacacctggcacattttacgtcaatagtttgtgcttcagaacagacatttgttcccatcctgattagactatgaactttgatatagtatttttttctttaaaagtatttgggaaatgtattacaaaataagtttagaatatataacaaacatggctgatcttagttattgtcacaactgtttaaaaagtggtggaagataggaataaatatttaactgtgtgatttctattcacataattagtactatttagacaaaggaattcttggcaaggctgagcaatgaccagcaacaagtttctaaaataggtaccttttaactagttagacaacttagaaaataggaaatatgcaagtatttatcaaaaatatttatcaaaaatgaaattatttctgatgttgatattaattattaattttgtgtacatgttgtttgttgttgtctgggtgaatttgtgttcatttattttgaaatatagtatctgtatatagcccagaatggtgaaatggaagagagaacaagagaaacttgccttcaaacaatgtagaaggcaagaacaaactactaaaagttgtcttgtcattaacacaagtgctatggaagccaggcaattacacacacatatacaattatacacatacacataaatacacacacacacacatactcacatacatacacacatacatacattaacatatatagaagcacatacacacacgcatggaaacacatgcaagagagaaagacagaaagaaggagagagacagagaaatagataaaaacagagacagaaacaaagaagaggggtgtcatttagaccaaagagttcttggcaaatcttggtttattgaaaattttgagaagtttaggattgatctctagcaaaaaaacaaaacaacaacaaaatacaaaacaaaacaaaaacaaacaaaggaaaacataactctggaaacgtacaaatcctttgttgttctaataatatatttattctttggttataaatataaccttctagaagaagcagcctttctccctcaatactgtgcttgcatgatctttcatagagactgaaagtcaaatgcttatgaacagatctttatttctagatacagggtagattagtctttgtatgtttgtatgttggcattttttttcactccaatgctggcctttctctagcctgtattttctcagtgacaactttcttttctttcccccctttttccccaacaggtgtcatagcaattgtaacatttatcactttttgtgtccttggaatcatggtgcacttcctctatcagcaaaagcagtcacaccgtaccaatcagatgaaggagaaggaatacccagacaacttggacagttcctttagaaatgacattgacttgcaaaacacagccatcgagtgcaaacgggaatacttcatctgaactattgtgtggtcatctggtcctcttttttgcagaggtttccatctctttttcttttctttcttttaatttaggcattctctttctctcacagaccattcatttcttagaatacatattatccaccaagagcaccaatctcctcggcccagctcaggagatcaggtagctgtggatattgtaatctattgacatatgtatcattgtaaaaaatgaccactgggacagggactttactattttaaacaaggaagagacacatgtgcccacgtgcacattctatgattgtagtccagtttctaaacttctctcttcagattctcaggcacttgatctttccagcttcgaatagacttgagctctgtggtgtttgcctttaacaattgtccctggtcaatatcacatttttaggtattacggctttagagaagaaaatggagtgtatgtgtctgacagagaatgatattgtcagatcatcttttaagggatgagtttatcagggagcagtttcccaattaatcaggaaagtatgaagaagagaaaatctacccagagaaagcaacatttgttcttttaagttccttctgagagaggaagggagtgttgagatattaggttacaaagaaaagtttgtaaagttgataagctgtgtgagtctaaatcaggtaattccctcttgtcatggcttaatgagcttaatgacaaggcagaattcattttcctgccaatagcctttctccactcaggacttagatttctaggagaacatgactccattaacaggtggggagctgagttgagagaggctataggtctgcatgggatatataacagcagctccccatagcaccttggagaacaaaaggaatgtagttgtagagtcccagttataaggacacacacctggtagacccaaggcagagggaaactcttcttgcctgctagattttgtggcattcggaaagaaacaagagatgtttaattttgttaggttaatgtccatactataagtagccccctgactcaattcattatttttttccatagaattttagtactttctaatactaagtgaatgaatagtgaacatctattttgctcctctcttgctatgctattttgaggcatgaataccaggaggtttcaagaaagatatgatgaagtagctgttcctgtaccttgccacttcccttctccacattactagaacatgttagctatgatctttcaaagattttcct

SEQ ID NO: 178 - DNA, 4744 bp, Mus Musculus
acaattgtgatgacccattggcctctttcctctcaccgaaggctttctccagttcctcagatctcactggaagttccagctcagctcaactgaatgggagaatgggaactggtggttggtctccagaaaattccagtgcccatcagtggctgcagttggacctgggaaacagagtagagattacagcagtggccacacagggaagatatgggagctctgactgggtgacaagctattgcctgatattcagcgacacagggcacaactggcaacagtacaagcaaggagacagcatctggacatttataggaaacatgaatgctaacagtgtagttcaccacaagctactgcacgctgtgagagcccgctttgttcgctttgtgcccttggaatggaatccaaacggaaagattggcatgagagtggaggtctatggatgcttctacattgatttttatttcttccaccaaaagctcagttttggaggaattccagtaccaagtaaacctgggacctttttaaagaaaaacttccaaggctgtattgaaaacctttactacaatggagtgaacataattgacttggctaaaagacgcaagcatcagatctactccgtgggcaatgtcaccttttcctgctcagaaccacaaattgtacctatcacatttgtcaactccaggagcagttatttgctgctacctggcaccccccaaattgatggtctatcagtgagtttccagtttcgaacatggaatgaggatggtctgcttctgtccacagagctgtctgaaggctcaggaaccctgctgctcattctggagggcgggactctgagactcctgattaagaacgtggcaggacatggaactgaaagcctcacaggcagaagcttgaatgatggccagtggcattctgtcaacatcaatgcaaggagaaatcgtgttactctcacactggataatgatcctgcttctccagctctggaaaccccctggctacagatatattctggatatagttactactttggagggtgccctgacaatctcaccgattcccaatgcttaaatcccattaaggctttccaaggctgcatgaggctcatctttattgataaccagcccaaggacctcatttcagttcagcaaggttccctggggaattttagtgatttacacattgatctgtgtagcatcaaagacaggtgtttccccaactactgtgaacatggaggacactgtactcaaacctggacaaacttctactgcaactgcagtaatactggttacacaggagccacctgtcatgattccatctatgagcaatcctgtgaggtatacagacacagaggaaacacagctgggtacttctatgttgactctgatgggagcggcccactgagaccactccaggtgtactgcaatgttactgaggacaagatctggatgacggttcaacacaacaacacagagttgacttggatacagagttccaacactgagaaaccctatgtcatgaacttaaattatggtgggagtatggagcagctggaggctctgattgatggctcagagcactgtgaacaggaggtaacatactactgtaggagatcacacctgcttaacacaccagatggagccccatttgcctggtggactgggaggtccaatgagaggcacccttactggggaggttattttcctggagaccagaagtgtggatgtggcctagaggagagctgcctggagatgtcaaacgatactggttttctttccttcaaagatcacttgcctgtaactcagataattatcagtgataccaacagatcaaactcagaagcagcttggagaattggccccttgcgttgctatggtgaccgacacttctggaatgctgtctcattttctactgaagctgcttacctccacattcctaccttccatgcagaattcagcgctgatatttccttcttttttaaaaccactgctttatctggcgttttcctagaaaaccttggcgttaaaaacttcctccgacttgaaatgagctctccttctgaagtcatattcgccattgatgttgggaatggtcctatggaactccttgtccagtctccttatcctctgaatgacaaccaatggcattacatccaggctgagagaaacatcaaggagaccttattacatgtagacaaccttccgaagagtatgaggatggcctcagaggaaggccattttctgcttcagctgaatagccagttgtttgtaggggggacatcatcaagacagaaaggctttcttggatgcatccgttcattacacttgaatgggcagaaagtagacctggaagagagggcaaagatcacatctggagtcagacctggctgtgcaggtcactgcaacagctatggaaggaactgccaaaatgggggcaagtgtgtggagaagcatattggctacacctgtgactgtaccaactcaccatatgaaggacctttctgcaagaaagagatttcagcacttttttattctgggacctctgttacatacatgtttcaagaaccatacccggtgaccaagaacacaagcctctcatcttcagctatctacaaagatacagctccatccaaggaagccatcacactgagttttatgacagcacaagctcccaccctcttgctctacctcaatttctcttctcagaattttctggctattctgctctccaggaatggaagtttacagattcaatatcgactaagcaaggaagaaagtcatgtgttcaccatcagcacagagaatcttgccaatagaagagtacaccaggtgaagatgagccgagatgggccagaactttccattcagatggaccagcaactcttcagctataacttccccccagaagtggagttccaaacagtgaggtcactcatcctaggcaaagttacaggtttgcttttctattctatatatttcgtagacgtggttaaacttgaggaatttgtcacctctgttgaaactcttgggttggatccagaagttgctaaagcaaatacactgggttttgttggatgcctctcttcagtccaatataaccatatcgcaccattgaaggcagccctccgccatgccagcatttctcctgtgactgttcaagggactttgacagagtccagctgtgactccatgatagactctgatgtgactggagtgactactgtttattctccatcagttccctttggaaagacagatgagcatgaaccactcacaaatacaatccagagtgactcagcattcattggaggtgtcatagcaattgtaacatttatcactttttgtgtccttggaatcatggtgcacttcctctatcagcaaaagcagtcacaccgtaccaatcagatgaaggagaaggaatacccagacaacttggacagttcctttagaaatgacattgacttgcaaaacacagccatcgagtgcaaacgggaatacttcatctgaactattgtgtggtcatctggtcctcttttttgcagaggtttccatctctttttcttttctttcttttaatttaggcattctctttctctcacagaccattcatttcttagaatacatattatccaccaagagcaccaatctcctcggcccagctcaggagatcaggtagctgtggatattgtaatctattgacatatgtatcattgtaaaaaatgaccactgggacagggactttactattttaaacaaggaagagacacatgtgcccacgtgcacattctatgattgtagtccagtttctaaacttctctcttcagattctcaggcacttgatctttccagcttcgaatagacttgagctctgtggtgtttgcctttaacaattgtccctggtcaatatcacatttttaggtattacggctttagagaagaaaatggagtgtatgtgtctgacagagaatgatattgtcagatcatcttttaagggatgagtttatcagggagcagtttcccaattaatcaggaaagtatgaagaagagaaaatctacccagagaaagcaacatttgttcttttaagttccttctgagagaggaagggagtgttgagatattaggttacaaagaaaagtttgtaaagttgataagctgtgtgagtctaaatcaggtaattccctcttgtcatggcttaatgagcttaatgacaaggcagaattcattttcctgccaatagcctttctccactcaggacttagatttctaggagaacatgactccattaacaggtggggagctgagttgagagaggctataggtctgcatgggatatataacagcagctccccatagcaccttggagaacaaaaggaatgtagttgtagagtcccagttataaggacacacacctggtagacccaaggcagagggaaactcttcttgcctgctagattttgtggcattcggaaagaaacaagagatgtttaattttgttaggttaatgtccatactataagtagccccctgactcaattcattatttttttccatagaattttagtactttctaatactaagtgaatgaatagtgaacatctattttgctcctctcttgctatgctattttgaggcatgaataccaggaggtttcaagaaagatatgatgaagtagctgttcctgtaccttgccacttcccttctccacattactagaacatgttagctatgatctttcaaagattttcct

SEQ ID NO: 179 - protein, 1133 aa, Mus Musculus
MGTGGWSPENSSAHQWLQLDLGNRVEITAVATQGRYGSSDWVTSYCLIFSDTGHNWQQYKQGDSIWTFIGNMNANSVVHHKLLHAVRARFVRFVPLEWNPNGKIGMRVEVYGCFYIDFYFFHQKLSFGGIPVPSKPGTFLKKNFQGCIENLYYNGVNIIDLAKRRKHQIYSVGNVTFSCSEPQIVPITFVNSRSSYLLLPGTPQIDGLSVSFQFRTWNEDGLLLSTELSEGSGTLLLILEGGTLRLLIKNVAGHGTESLTGRSLNDGQWHSVNINARRNRVTLTLDNDPASPALETPWLQIYSGYSYYFGGCPDNLTDSQCLNPIKAFQGCMRLIFIDNQPKDLISVQQGSLGNFSDLHIDLCSIKDRCFPNYCEHGGHCTQTWTNFYCNCSNTGYTGATCHDSIYEQSCEVYRHRGNTAGYFYVDSDGSGPLRPLQVYCNVTEDKIWMTVQHNNTELTWIQSSNTEKPYVMNLNYGGSMEQLEALIDGSEHCEQEVTYYCRRSHLLNTPDGAPFAWWTGRSNERHPYWGGYFPGDQKCGCGLEESCLEMSNDTGFLSFKDHLPVTQIIISDTNRSNSEAAWRIGPLRCYGDRHFWNAVSFSTEAAYLHIPTFHAEFSADISFFFKTTALSGVFLENLGVKNFLRLEMSSPSEVIFAIDVGNGPMELLVQSPYPLNDNQWHYIQAERNIKETLLHVDNLPKSMRMASEEGHFLLQLNSQLFVGGTSSRQKGFLGCIRSLHLNGQKVDLEERAKITSGVRPGCAGHCNSYGRNCQNGGKCVEKHIGYTCDCTNSPYEGPFCKKEISALFYSGTSVTYMFQEPYPVTKNTSLSSSAIYKDTAPSKEAITLSFMTAQAPTLLLYLNFSSQNFLAILLSRNGSLQIQYRLSKEESHVFTISTENLANRRVHQVKMSRDGPELSIQMDQQLFSYNFPPEVEFQTVRSLILGKVTGLLFYSIYFVDVVKLEEFVTSVETLGLDPEVAKANTLGFVGCLSSVQYNHIAPLKAALRHASISPVTVQGTLTESSCDSMIDSDVTGVTTVYSPSVPFGKTDEHEPLTNTIQSDSAFIGGVIAIVTFITFCVLGIMVHFLYQQKQSHRTNQMKEKEYPDNLDSSFRNDIDLQNTAIECKREYFI

SEQ ID NO: 180 - DNA, 215120 bp, Mus Musculus
  misc_feature (1)...(215120): n = A,T,C or G
cctctggagcggccgcgccgaacgccatcggcgtctccgttctcttcgcgccgccgccgccgccgtctcccaccttcgcctcacctcctcctcctccgctgcctccggagctgggggannnnnnnnnnnnnnnnnnnnnnnnnnnnnnnnnnnnnnnnnnnnnnnnnnnnnnnnnnnnnnnnnnnnnnnnnnnnnnnnnnnnnnnnnnnnnnnnnnnnnnnnnnnnnnnnnnnnnnnnnnnnnnnnnnnnnnnnnnnnnnnnnnnnnnnnnnnnnnnnnnnnnnnnnnnnnnnnnnnnnnnnnnnnnnnnnnnnnnnnnnnnnnnnnnnnnnnnnnnnnnnnnnnnnnnnnnnnnnnnnnnnnnnnnnnnnnnnnnnnnnnnnnnnnnnnnnnnnnnnnnnnnnnnnnnnnnnnnnnnnnnnnnnnnnnnnnnnnnnnnnnnnnnnnnnnnnnnnnnnnnnnnnnnnnnnnnnnnnnnnnnnnnnnnnnnnnnnnnnnnnnnnnnnnnnnnnnnnnnnnnnnnnnnnnnnnnnnnnnnnnnnnnnnnccgctggcggcctcccggcgtcctgctcggcctcggcgtcgctgtgcacccggagcctggacaggaagacgctgctcctgaagcaccggcagctgcttcagctgcagccgtcggacagggactgggtgaggcaccagctccagcggggctgtgtgcacgtctttgaccgccacatggcctcgtcctacctgcgcccagtgctctgcacgctggacaccacggccgccgaggtggcggcccggcttctgcagctgggccacaaaggcggcggggtggtgaaggtgctgggctacgggccgcctcccgccgccgcccctgccgccagcgatcagaccctggacggagagcacggaagggacgtggagccaccgccctcgagcggcactgttggtgctgtccggggccctgcgcgcgcgcctcccgccgatctgccgctgcccgggggcgcctggacgcgctgtgcaccccgcatcagccccgcgccttcggactccagccccggagagctgttcgcgggcggccccgggtcccctccccgcgccccgcgcccggcctctgacaccgagagcttcagcctgagccccagcgccgagagcgtgtcagaccggctggacccctacagcagcggcggcggcggctcctcgtcgtcgtcggaggagttagaggctgatccggccatgccccaccgccccggccgccccgcgcagcctcggccgccttccccgaagacctcggctttactgcagccgaaagccccgacgggcgtagacagcactggcgtgatagcgggcgagggtcccggagacgataaggcgatggcagccgcagctccggacgttcctctgtcgacttcggggaggatacgggagaccgtgcaaaagacatctccgccctccctgtatgtacagctccatggagagactacccggcgcctggaggcggacgagaagccattgcagatccaaaatgactacctcttccaactgggatttggggagctgtggagggtgcaggaggaaggcatggactcagagattggctgtctcattcgattctatgcaggtaaggaagttgcctgcatgtttatgcatggcttcgaaccttggcagggatcgataaatgattccaggggcctggtgagtctgtctgacactctttttctagcttgttcacatgccgcctgtgcaagtactaaattgagcattcttgaaatctgcaaggtttagagtgtccaggcctgaggttggaaagccaggtggacaaggtgacaaagtcacctggaaatacaggaaacaggtaacaccctagaggggtaccagtccctaactttaaaggtggtttcctccaggcctctgctctggttcgttgggttgcaggcgttttgggattccaggtaactccttgacactttaatatagacagaggacaatgaccaacgaaaaaatgctccatgatgccttcctctattcaactgtccacagtttaccattcgtagacagtaaagtgcagcgtgggcctcttgggaactttgttcttgtcaactgatgctcttgtttgttccactgtctgccacgcgtgcgtatttgctcgctgagtcctcattgacacctgagaagtgggtatgttccttgttttgggtgctgcttaccttctgccctctttcattgctttatttcagtttccaagtttgaatcttaaaaaaaaaatgaattggcctgtttctgagttatagcttttattgtcagatacttgaaatagactagacttaataatgtcggtgattactgcttctgatatgacctgaactcctctctagcatttttagtatctgttcaagtgcctatacgggtgtgaccagtcagtttctcctcttggctggaactaatttgtggagttacagggctattggttattgtttttgagcttggtaagttattgcattttctggttgaaagagtttttagtggtcagaacttagctagctagcttaagagcaataaaacttttggtgttacatttaggtgtatatactaacaacctcgtgactcccatagtggttggttcttccacattagtgttttttcattttagttcaacatgtgccctagttgcagtttggtttgaatgaatgagtctttaacacttacgttgataatgcaaggcctcatccctggacataaacataaactgttttattgaagcttttttgaacttaagtggatattttgattaatatttgccttataaagaaaaccaaattgtaatacaatagcattttcctggaactaatatcttaatggatgatatgttctttaatgttttttgtttttttgttttttcttttggtatagaaaagtgtagcagcaacaactgtatctttttcttcaatggctcatgtgactggtgaaatactttttttttttttttcagaggcatcaaatagtaccacacttggaaagggaactattttcagatgagaatgacagtctttcttaatcacatagagggaaatgggaataacacaaggactatgtgatgggtaatattagagtatgctttaatggatggaggaagcttttctctgctttgctcatgactggatgctgatcaggataaatatctgttggaaggttgggatgtcacagttctgagattttggtcgtcttcagaagtgctgaaattattctgagtgggctttaagcagtttgttttctttcatctaaattgaaaaatgatctgatttatggctaaatcttaaatatgttgtgattttaacctttttgtttgttcatgaacaagtagtaattgttacctcctgaatttactgctttgtttctatgagcacagcataaatagatgcaggcgtctgtgtatatgctcataaaagcaactaataaaatgaggatgccctacacacattatccagcctattcttgaatctgaagcctgtgtgcttgtgttgtagaaggaaggtgtctgactgttggaaagatgtggggttgtctattttggtatatgagcaaagttggacttactttaagcctaatttaatataatatactgagcatctctgtactgatatttgtcatagaacaaaacttaacatcactagatgctatttcagtttttgcaaggatgtgtgttactaacagaagggtgccgctgaaaggtggtctcacatagcttgaacgttgtgaggacatatggcaaaggcttacccaaggctgacaagattcctagaaattgcttttgtcctccagtggaatataggacagccaaaaggaagctgttgtgttttgatagtgcttttgttagcgagaggataattcatgtatgttttaaatgatttcctttaagaagacactggaaaattttgtattgatttgctctgataatttaaatgtagtgtattcttgaatttattgttgcatgtcttttctagtggagttaagtggagtttaagatagctaggaagtttgagactgcttgaaaatatttccctatatttaaattgagaacattatcattatctgtatttttaccttctcagctacctggtttcttattttcacaaagtccttgtccagaagagaacttccattctcttttgaaggtcactgttcaaaaccattacagtgcttataatctttctcaggtggttgaagggccttgaaagctatttgcagttactttgaatggtttggggtaatgtaaaatgaaagtctttaaatgaagtcagtgtggatgagaagtactacctaattacagtttctgaaaacttagtttgaaaattaatactgtacttacgacaaaagcattctttgagtttcaaaatattaggaaattgagttggctttatctaatgtttcctcaagtttgctaattatgctaatgtttaatttccttttaaaaatcttgcaccttaagttttacctggaagaataattttaagttaaaagaattttaggaattcagttacctgatctaagttatgaatacctagcatgaatgagctgttttgttcaggactccctggggcatttgtgtcatagggcagtagtataaagtcttacataaatttttttccttacctattactttagctacagttgcctgcttagttcaaatcatagcaacaagaaagagtgttaccagacaggagaacacacctcgcacctagtgtattttggaaggtgtgtttatgtgggcttctgtggtagtcagccagctttccttccctcatttctaccctctttctcttctggaaatgctcagtccttacatgatctcgtacaaaaatgggtggttatcttcaacatcatacttattgataagcaggttcttattactgtaattacagtagtaccgagtagagtagtatagtttgaatatgttactccagtgtgagcttcaacagtgctttgaaagtacaaaggattttacttgattttgttgttttttttgtgcctaacactttgttatgttcatatatttgttcttttttcacatgaagcatgtgaatcttttgactatggcttgctaactcccatacattgggctttgattgtcttctagaatatgaaagggcttcacttaaatgatctcatttgtctcttcagactccattagggaggaggccctggtgtcagtcttcttttcagactgcccatctgatgcttgctgtgggtttcagcccctggcggagctgaggttagggagcagaacttctctgttttgtaattcaactcactttctatgaattggtgctgaatttaatttacacttgaatttcccctaaaagctttcagaaaacatgctatgtttataatgaggtgctattaccagtttgtcctatgtggggttccttgtaaagtgcagatgactctatttttatcacatggcctttaaaaatgtaaagaactgagattgacaactgagcacagaacagaaagtattgaaatatcctaagtattgtggttataaattgtgatacttacctttaaggttgagaaggctatggagttattagttttttacccaagtattcttgtttgttaaatctttattgggaaattactgaacagataacttgagagtgggggtttatgtgatctttcctttaaagcaatgaaaatacccatcactaaagagtatatgtatttgaaattagaattaccaatactccaacaacaaatagtattttgacattttcttgtaccattttgtaattcttaggtgtgtgagagttagggagcaagcattctttgaattttactatagtgttttgaaaatggtggtggttttgtattcataagaatgattgtagcgggggagacaggtataaatcagtctgtgcgaggtctaaggttataagttttagctttttcctgaggtaagatttaatcaggagtgcagacctagtatttgtgaggctcacacgtcagtccacaaaaccaaatggactgtcaaatcagctgccttaaaccgttgcgtaagatgtgtttgttcttataaaattgaatttagcttttgtttaattaggaaggtaacattcgctgacatcatatagggtctgtgccttgtatgaatcttggtatttttgcttttttcttgagttggtttgtgtaatttcgttaagcagctggtggagtgtgtcctgattcttttgacttccatcctgtgtgggtccccaaggatgtgttaaacacacacatgcacacagaggtatttctcccatggccagagatttctgatgtgccacatactattaatgtcttctgtttcacgtgactcagctctgtgaactttgagagaacaattttccctcaaagtttccctagagtaaacagctcctctctttcaaaggcatctcatacctcaccattgagatcaatttaatgagacacctgtcaaatgaggcggcgtacatttaatgattttgttaggtgtcacattttatgcagtccagtctgtctggacaggagtagacttaattataaactctgaaagtccactgtatgggaaaactacttctttaaaaatacctggcatttgtgaaaattgagaaagaggccttatcaaagtgtctcctaacattctgggaagagaaggcccctggatccagcccacgttctgagacccactggcactgagggcttggacccagcctagtgtcctggacctctaaggcaggctctttctatttacctttggctttctaaagatagcataataaccaaaccaaaccaaaccaaaccaaaccaaaccaaaccaaaccaaaccaaacccctgcctcatgcagttctaggtattttaatctaagactgtttgactgttttgttttatgtgaagcctcaattaaggatttagaaaactctaggaagctgacaactccaggatatggaaagaatggattttaatggtactttgattaaagaacactaggatatttggctagccgtgacagagctctttcaagttctgtggtatagtaacttttatcatgcatgatagtggtcaccagttgatgaagcacagcttaaatatgttgggtgtagtggtcttcttgttatcacaactcatttggaaccctttttagtatgttatgtggagacaaagcataactgtcccacatatttgtattgaaatattttctcatattttcagattcgatactgtttttattcattctgaacacatttaatgatacagtcttattgaatgagttatatatctagtggcttctgcagttgtagtgatgtgttaaaagtgggcaaagtgctttatttgtatatagtatatattttgcatttgaaaacaaatattttggcaaaaaagaaagaaatttccagtatttttggtgtaaacttcattttttaaatgaagcctgactaaaaaaaaaattagtctcatttccagttataaaaatatattcaattgaagattgaatataatgtgaaataatttagttgtgaggcattttaataatcagtgaaaattctatttagaaatttaaagtataaatggatttgaatggcagttttgtttatttgtttccctttagtttttctcctttttcccaagcaggaagaggtttatcagtgtgttttgtactgcatatgtgtggtaagcaatgcttggataatagatcttttcatattcctgcctcggataatgatgtgttgggacacttggactttctcgtcaagtaccaggcttcgttttagatgtagccggagtaagcatgagccatgctgcttttcattacctgtttattggtttaatattaattaacttctgaaacattggtccagattttgacattttataaacagattgaatttttgagccttactatgagaactgtatcacttgggagagctttcttttttcttatccatgcatattgagggtgaggctagttgcagccttgttattgaagctacctcgtgtggttcttgcatttggctgatgctctgtgtatgttttggggacagggagtaagtaaactaaatgtttatcaaagtacaaaaatttgggagtaaaagccccctcttatttcatagtttgggaaggagatggtagtgtgtttttgagaaaccagtttgttctgcgagttggtaaacttgatacgatttgttgattttttttttcctcctggtgctgaggagaggggtacatattagacaggagtcctacacgctgagcctcatctttagccctttgtctttgtgagacaggtcttgctttctatatagcttactatggctttgaccatgaaacctttctgttcttctgctgctttgggccacaggtgtgaggtagcggaatacttggatattcattttaacctacactgggctgtgatttcctcatctgtaaaacgatgagcttagaaacagggcaaatccaagatctcttccgactcttatcattctgaaactcttatcaggaagcctaattgatgcagattttgaaagttgttgtagactgattttagatggatttgaaagttggagttgttttgagttctgtgttgttggttcaaaactgtcaaatcacctagaacttatatctaatatattagatgtcaaagcaaactttacatctgatatattgcagtcaaagcagacttctgtttggataaagaagataaataatgttttatttaatctcttcaccattgatatttcccaaagtagaatctggatgctagaggtgagttgaagttaaactcttttcttaattgattcgtaaagttcccttcacaatctggtttatgtagcttactgtaataacatatagaggaatctcattgctcaaaactgctggttgaatattttttaaagtttgttttatgtgtatgtatgtgtgtttatggacctgtgtgtgtgtgtgtgtgtgtgtgtgtgtgtgtgtgggtaggtaggtaggtagataggtaggtagataagccagaagaagcccccacatatgctggaactagagtcacaggcagttgtgagctgtgcacagtgtgggtactggggaactgagtctgggtcttctgaaagagtaacaagtgctcatagcctttaagccattctccagctctggttgtttagttgtagctcatggtagactgaaaattcccattactcttctcagattatagaattcagaaaactgagataatttagcacaactgtattttactagatgaggaaagtaaactccaatctgttcagtcagaattaagaggacacccagattttgataagtcctctagtgtcattttctccacactgtgagcttgtaagatgaactatttttaggtgttctttatgttttaattattcaatacgaaggctgataactgttctttacacatttcctggtttctttattactgtttctttctaatcagtgccgttgagaggtggctatcgctgtggcggactgtaaggggagagcctgtaactgaggagccgaccgccatgtgctcagtgcacagagggaaatagatttcattcctgatgctacctgctcctcgggagatttagcatagacctcagaccagttgccagggaagaggctgagctttagaatatcagtttgggcttgctccaactttgaagttgaagtagctagaagtttggaaatgttggaaaaagaaatcattgaattaaaaaaaaaactaatcagaaaatattagagtagatttgaagtacttctttccaagaatatctgtactacaatatcccatattaattgttcttataaatttattattatattggaacatataaattgttccatgtaggggctggtgagatggctcagtgggtaagagcacccgactgctcttccgaaggtccagagttcaaatcccagcaaccacatggtggctcacaaccatccgtaatgagatctgactccctcttctggagtgtctgaagacagctacagtgtacttacatataatcaataaataaatcttttaaaaaaaaaaaaaattgttccatgtaaaaaacctaaaagttcaatataatttaacctaaagttaattatgcagtttattattctagtatctgtgttaagttctactgaagtccccgttcatggagtctgcctttgtagtgtgcatagttggaaaactttgttcactgatatttgtacttctgttatgtattgattttaaagtctgtatcatgaaaattactttgagaggtatttatcaatcatccatccatccatcaatccttcaatccatccgttcatctaaccacccacctatcacatgtgatagcaaaaatgtaatttgtgagctctggaaacaaatttccaggtatttttaagagggtatgagaaagatttcctgttaatggggctcaagttttgtgaattgattccctggagaattcctgttcatttttagtatgagaagagaaaccttcaaagtgcaggagtacaaaggtgcgaaagggcagagttacattgcatctggaagattcagtgatgtatcccagatgctgaagcaagggaggaatttcttgatggtttcttagaaaaatgggatggcctggttgctggtgactttcgggtttaaataacaaggaacttttatgcataaatcctgctctagtaaccagacttaattctgtcttgaactcaggcatgcacgtccacacacatattcccactgcatttttaggtcgtcgacaacaggagttggtgattgtatttgtgggtgaagtatatgcacagcatattctcgaggaagaaaaaaaccttaacaaactactcttcatgttttcttgagcctttctccacattggtagcttaatgtgaatgcctgtttacgtcactaatctgtcttgggtgggacgcttttctcttgatttacaaatctctttgggaggttcatttagggaaaagttttgtttcccaaatctgtaatatttttgttatccattcacttcttcccagtttttccctccgagttctcaggccttaccatgcttaggaatgccttcatcttcccaagactgaaaaacagcccttgctgtcatttcggttatctatctgttgtttgattaggatagggagtagggaagtagggaattgaagctgtccccgaattttaaaattgagtaatttttttctttacttattgaaaatgcttctcttttcctcagagatttttgctttttacttgataggaaattcagatttatgctatggagtgtttttggcccagtgacatttgaatttgttgaggcaaaaataagagagaaaaggctactcagttagtgtactactgcttttcttttttatgctttaatttcatatattgccattactttaaaaaacacttattttctgtgtacatgtgtgtatttgtactacccgtgttcagtaccagccaaggtcagaagagggtgttggaactcttggaagtggagttacaggtggttgtgagcccactagacttaggtgctgaaactgaaccccagtcctttggaagagcagtgaggttgttttgttttgttttgtttgacaggggttctcggtatatacctgactgttctggacatcttggctagccttaaatttacagagagtggcctgcctttgtcacccaagtgacaccaccatgctgggcctacagtgagtgttcttagcactgagccatctctctagctcgggatggaactcaggttgtcaggtgtggtgacaaatatctttactcactgagccaacttgctgtaccatggtcatatccatccctccttcccttcactttagaaacatgattctatgtttcaaatttgaaatcttggaatactttccttttcattaggaatgaatctcagtttcttatttacatttaaatagaaaatccctctatttctctttgtggagaaatctgaattaccccgatggctattgtgaaatacagtaggtttatctttgggatttagaaaaagtaaggctatgatgccttttagagtcaggaggcctggctgccattggggctctgaggttttctctggttgacctgggaagtaggtacatggagtggtcatgaaccaatcgcaattactattactgtgttttggtacttgggattgaatccagtggctcatgtgtgctgagcaatgtctctagccctgatgaaaaactcaaggtcagtcagagacattgtttgaaaggagttaggtgtgttcttgaggatgacaatcagggttgccctcagcttccatatgtgcttgtacctgtacacacaaacacaaacacgcacgcgcgcacacacacatattataaaaagagtaatttgaaagaactctgatttgatataggggagcattgtgttactgggaccagtgttcctgtggaaactgctgtacatgaactctcagaaatgatgaaatggtatttagtgggggtggaggaaggttgaagcaatgatattaaatgtagaagattcaaatagagtatcatctttgttaagcagctttaaaaatctggtgaccaattcctaattattaagtgtctacaagctataagttgaactgctatcacactttggctttataagattttacttggtagagaactgggtttcttttctgcagggttattttagccaagttcttccagtgtagctcaaggtgaccttgaacttgcagcagtactccagacttagcttgctaagtgctgggattccaagtatatagaccactgtacttggtcatgggcttttaagttgtgttgctgaggttccaaatctccatttctggaagtagactttagatttgaatacattcatgcttagaaggtgggtatacagtcccattgctctgcaacattaaatgaactaagattttagttgacagactgatttgttaactgcaagtgttgtagtttgctgtcttttgctgtgataaggaccttgaccaaagcaacttgggtgttccacttcacagcttatagttttttctaagagcaatcaggggtagaacctgaggcaggaatatggagggtggaaccagagaaggggacaaggaggaatgctattttactggcacatggcggcatagctcacagtgccctgcacaccctcctgtatcaatcaataagcaagaaaattccccaccagcatgccggaggcatttcctctacgttggcctcctctttccagatgtctccagcttttgtcaaattaagaaaaaaacctaacaagcacagcaaataacatttattttttacccccacattaacaaagcagaggtcacttcttttaatttgcaaaattaagtgcaaaagatttaaactgcctcatcattgttgtatcctgctgtataacgcctaaaaatgtatagtagtttattacttagcaaagagattacagtttgaggccatgtttcaagttctttataaatattaactaatttaatcctcatcataaccccaggagcagatagtgctatgtgtattgcagatacacaaactgaattaccagtttgcaggctgactggatttgtttagcaagcaaggcagaggtaaaatttaggtccacatgtatctggtgccggggttaactagttctctagttagtgttctctttgacctgctgtagaaaacagtatggccctgtggtcaggtgtgctacatctgtattgagaagcacagacttggagctctaggttctgggcttgaggcctgcctgtgccaccagctctgcttcctttacttcctgctgcttaagctggctgaggatcttttgggacctgaaggaaactgcctaggaacacagtattacaaagcaggtactaattagccacgtattgctagggttttctttttggtgggaagagcattgactgagaaactggagacctgtgtttaaccatgagcctctccacttgatgtgatgcctgtaataagtcctttaaccccctcagcctcatttgtcagagagggagaaaaggcgattaaaaaaaaatccatctgaaagaactttgtgaggttgagatttgaggatatatgtggaagtgctttgtaaactgtgagatgttatgtaaacataatgtggttctattatttttagcaatagtaaattgccacagatgttaatgagtgttaattagggctcattaaggaagggggggcgggatactgtttttggccctgatgctcagttatagaagaccacattcaattggtagttactactgaatatctccaacatagaaggtgtttaatatgatttacctaagatgccttgaaagacttgagggcactttggggagacatggtaacatttacaacagaaaagtgatacttttaaagcaagccggggttctcactagttactctaatagcagaaaaagagggagggtcctagctacacagagtgcactctgggaaagcttgagcccttgaagggccacgaggaataattgctgccttacttctgggatctggcttgtttatagaaaccataaggctttagttcaaggtccatttatattgctagggttagtcattccaatttcatctttaaaatttgccaagtactcccctaggcacccaggcatttttatttgtttgaattatttggggcttgcttttgtatcatagcttgttagtgtctaggttctggggaaagcatctattaacatcttttgcttagatgtgaatgtgtgcctgaagctttgcagtggcccatgttatgctgaaagacattatcatcatcatcatcttcttcatcatcatcatcatcatcttcttcttcttcttctttatcatcttcatctcctcctcctcctcctccttcatcttctttttaaggcctgtcacattttatttttatatggatttatgagttttatgggagatgctatgtttctgttttgaaagaaggcacttaaatttcatgtattgaccacattaatgtaaaatttgaatgataacaaactgatcatgactttgtgctttaaaaagaagtcttagactttgtgttaaacttcatggacaattttttatcctttaaactatgtgttgattaggagaaagtacaattcttaggtgttcacataaacatagccaatatactgtcttttcccctcttgtctataacactgcccacaggtaagccatttaaacttttgtgttacatttgttaatttgtatatgtgtgtatatataggtgcatgtattagtatatatttatgtgtgtatatgtacacatgtatatgtatatatgcatatgtgtaatatatgtgtgtatggatatgtatatatgcacgtatatatgtgtatatgtgtatatatggatatgcatgtatatgtatgtatgtatatctgtatgtgtgtgtgtattgctcatcaggtagaggacaacttgctttcattggtaaggtgaagtttttactaatgaggtcttatgaattatcatctctgtgaaatgctgccttatatattaatgtgaatgacaaccctagaagagctatgttttgctcttccacattagctgtaagattctgacatatatcataaaatatttctgatcttgtctgacaaaaataagtcatgcttctaagtcaaatgaaaatacttataattcagactgatcagaattcaagctaattatctgccaatatacattttccaccaccattagcacctatttgccctctggaaatgtttacagagactttagctgactcattaccacagtttccatacctgacaggctgacttcatgggatgttttaactgaagtgttatcagcagtgtgatcataagaaggatagctactggcacatgtgattatacagcagaacctcaatgagcccttgttctctaatacaggaggacaaatgctttgtaagtgtctatcttggaactacttaagaggacaaggctgttctaaagacactaagcaagaggctgtttcagagtgcagggcttgtcctctatggtcaggatgcttgtgttctagcctgagtcagcttgtagcttatagaccactggagctgtcactgcacctctgcccttagtacacacaaaacagagtggtttgcaggtctgctttaaggaactgacagattagcctacctggcgtctacctccagatagtactggtggataaaggcataaatcatgtttatttatctttaaggtactttgatatggacatttatatttaatctatgcacagtatattctttatcttaatagaactctttttgaacaaaccagcattgtttgtagacagctatcaaggcgacactgtgcgaatagtgtaatgtttactcaagtatagttttccaggctttactggcaaaaagggaggcagccttgggggtgtcccagagtttagaatcttaataatctctatcctcctgcctccgcctccttagtctgtaccacccactcaccacccaccagtccagtttcttatttctcacagaagcctaatattaggaaattcttgacagatggtcaactagcatcctcctgcaagctatgaaggtaagcactttgttccaggacagcatttctagagttttgctatgaaatacgttgtttggaccagcagctcctcggaacttgttagggatgcagactctcaggacctccctccagattttcctgttaccactttaacaggatacccaggtgttttcgtggacactgtagactctgagaagtactagtgctgagtaaattgggtgtggagagatttggagttggggtggaatgattgtgtgagattcagatgtgacttagggagacagtgggttcctgaatagggcagagagaaggagggaaaacagagacttatatgacttcatcctgagatccacttgctaattgactgtcttactggtagaaatcacaaaatttgtaaatttgtggtttgggtaatgggaggattgtgggtcaatttatgaaagtagtaggtatgaggtgtcacacatttagtaagatgtatggactgggcatgtagttagaggctggcggcataatgagtgacggtttgcctcctgctctgtttcacagatggcacattgcctttgctgagacatgagtgagctggttgctgtcctccccttagctggcagccttccttggtttacaccagcttctaagaattggtccaactttgttgtttactattggttagtgtaagcgttgactcaggaagatggtagaaatgttgcctagttgtcttacaagagtccattttaaaaatacaaaataaatgtgagtactggctatggctatgggacacaagtgaagagatctaagaagaatattttatttatggaattcttaggttgtattattttaaatggcaatgctttcctttatagtggggtggggacttatataaacaattaccaccctgcttcctgaaagtagaatgattctactttgtggactggatatgaaaggtatagaagtgttgaccattgtcctccaagcagagtagatgcagttctcatcagaacagctctaactacttgcaagagaccctggagtccattgactggtgaccttccttcatagaaggaggggtggggagagttcttggttccccttcacctcctgagtcactcctgctggcacggcccagcttagccaccattgtccatggcttcctgaggtgctgtggaaggttaactgaaggaagattccgtcggtgcagttaggagaaagtcctcatccatacttggatgagtggtgtccgtgctaagccatcatgcaagcaggcagagttttaatacgttaaattgaagggtgacatgactagatttgtattataggatactagtggacagtcggctggagggagagttggaggaagttcctggacgctgggggtcttcttcaggtggaacatttagtaaactcttacagaatttatttatgttaatgttgcctgttcccagcaagcaatgtgatttgttgtctttgcctcaggtcagcctagtcggaaagaagaaaagaactaacagtatggactctgccactttcaaggtttacaagcatggtggttgtgccaaatagaaaaataaccagctctgttttggtaggtggcagaggttttgaagatctggaagagtaacccaggaagtaggagtgtgtgggaaaaggcctgggtggagtggtgtagctacctagttgttccatgaggaagggcgtatccaaccttttggtatttttcacttgactttgtttcatacaaagtccatgctcaggaatgatacaattgaattacaaaacaaaacaagacaaaacaacaccaaaactcttcatgtttcaagtgaatttatgatatgttgggctacattcatagctattgtagcgtctgggctgttgattgaatatatttggatgatgttgtatagataaaaaaaaaatccaccagcatagaggaattgtttagactatagaattatggattttagtatttaattatgtgtgtaatatgtctgtaggggacgggtaatcagactttttaaacatgaatttctgatagaatttgaatatgtttccccttatgggaagtagagatatactgtcaaacaagactgacagggttttagatgccagtttcacttggtttctagtctgagtgagtataatcccactaatcaactcttaagaattctttaaatgagggggagagatgagttagaatttgaatatgtccagtgtggtatactaaaggacatcaggcatgtcaaagctcaggcatcatttatattaaagcattagagtttttggtggaatttgggaatgtagtgccctagtttgcatctctatccctgtgattaaacactgacgaaaagaagcttggagaggaagttgtttatttaatttacatgatagtttgtcatgaaggaaagtcagggcaggaacctgaggcagggactgaaccataacagtggaggaacactgctcacaggcttgctcccgtggcttgctcagcctgctttcttacacacccaggacctcccacccagggatggtattgctcacaatgggctgggtcctcccacatcaatcattaattaaggcgggaggccaacctgatggaggcagttccttaaggatccctcttcccaggtgattcttctttaggtcaagttgacacaaaggaataagacagagtgttatacagggtgcacatagttctgaggaagcagctctgacgaatgcttttatttaaaaagtgttgatgggttaatattgagtgaaaaaagtcagacacagaagagatgtagtctatatgataggcagttaatagccaacttttggtgttgtagctgtcaaagcgttagcaatgggaaacgacattgagtcaccgagtctttgtattgatctgaagtttagttttcttgagtgaagatttatggaactgaactctctacaggtggtgaggttgagtacatacaagatggaagagaggtaaaaggtcctgagaggagcattgttactgttctgagatgagggaaagagacggaggcaaaggatgatggatgaacggagaagaaaaacaaaggaagggaattcctagaagaaacaaatggaggcagaacccacttggatccatgttaaccttgaaccatccagacatttccctgagacagaaggatgagtgaagaaaaaagttcttggatctggagagagtgctcagcaatgaggagtactcagtgctcacagaggacccgggcttggtcccagcacccgtgtcagggggctcacaactgtctgtgactccagtttcagtggaccatgaccccttttggcctctacaagtacctccatgcacaggcagtgcaaaacaactcaggcatgctcacttaaataaccataaataaaacaaaatacttccttttttaaaaggaaaagattgtttttctgagagttcagagttcggactcagctggcttcagactttttagtgaattggaaggtggcaccaagccttcatatttgttgtagtgtaccttttcttaagtcagccaatcagctgatcagtctacccttaaattggagacttcttgactgttttcaactggtgctgaattttctaaagggcgagcgttctggggctcggtgtgtgtgtcacagtgcactggaaagagggtgaggataaagaggagattaggaacagattgccaggcatggtcttgtagatttggctcggtttgcattgggcaggttgtcgtggtagcagtttctgattctctcctcactttgtctcgagtgtgtgcaggagaggtggagatggagaggaggcagcagcgtggtcagacgctttctgtcatgtagtaaatgagaggctgggattatgccttctctatttccttttttgtttgtaaaatcacttctggattacttttgagaaaattttggctttttttccttttccctatgacttgattatatttgaagataagaactgtttggtgaatattatttttcatttttagattaataaagtgatttagagtttaaatctgtttacaaagttagtataagaccatgataaaatttaagtatatatgtatatgtgtgccgtgtatgcaaaccagatgatatagtgcacagttaatgtattctaaataataaatactggcaagaaactaatgaacatgtgattttccttaattataagcatagaattcctattttgtgttcattattggactatatgcagagatttcaaaatgagtttttgacattattttgattgcttttaagaataaattcctcaaatatgtataaaatttcctagatcatttggctattttatgttcaagttccaatatttttatatatttcttatctgcatgtatatgtgtatggaaatcagtggtcagtcgtgggtgtgtccacctctttttgagagcctctctcttcctggggctctagtcgagctggagtagccagcaagccttagggaccctgcctctgcctctccagtgctggcttccaagcgcttgtgtgtgacaagcactttactagttgtcccatctcccctgccctggcttccataaatttctagtaataaacttcttaaggactatggaagaaactcttgcacgtgcccccgtggccagcatgtgccccctgtacgtcacttgctaagcagcaggctgtgtcttcaccctgtgcacacactctttactgactgaaccacctccctaaccccagcttccataatttctagttcattgcttaaccacttggctacaactacaactacagggttttaaaccggccattcagaagaaccgtgagtgttaattcttcacccgaagctgatggatcgccagacagaatggttggggaattgagcttaatttaccaggacctggaatcctgacaggactgccccctgctcaggatagctgcacagttttgctgttattcacacaggaactttgttatttacaggcttagcagtttctggcatgaagttttatttgtgttcaaaagtcactgatcagtggtaacaggaactttaaaaatatgagatactgttgtgcccctacccactctgtcatctcaaacagttatagagtgcttgcctttgctttcaaggtggtataaggtgttttggaggtggagggaaaacttgaatcggccccagctttttcagaagattaaccaatttgaacaaggacactgattgtcatgagaaaagcaccaggagcattcttcctctttcctttatggtttcttgaacttggtgcttgtaaaatgtcagtctataatcagatagataaggcccctgctcccaggacttcaaagtaaagggcgactttaccaactattaagccggatctggtatcaccttcctgcagtttaccccttaggaagcaaaaaaggaaagttgatgcaaattcccagccagcctgttctatagagcaagaccatgtctcaccttccattctcctcagaaaattactaagtactcatagaaagagccattcgtaactgtgatatgtgcccccaggggcagggtatgctgtgcatccttcctgtgagcactgagttttagatggtgcttagaataaatgatacatgaaaatgtgttcaggtagaggggcagatgtatggaggccgaaggcctgaggctgggagctcagcatctctaaggatctaggggaagacttgggactgttggcagacagcaggaacctcagtgtagtcacttacggggtggaggaggtgggggatggctgcttctgcttgtataacattttgttcacagctctattcccccaccttaagtatagtacagaataggtcagtttgcattttttgttgtggctgatgacataggccttagaggcacagttagtgttttggaattgattttaagaataataaatcattccattgattttttttttcttttaatgttcttttaaggatatcctttttaaggtcagttgtgtaaccattaatcaagttgtaaattttctttttatcaccacagtaggagggttaggaggaagaaaagcccagagcaccaggagctgctgctcttcatccttctagcatgccccagccacctgcccttcctcacctgccacactgggtgctccactacgaggggctgtgactgaagggtaaagacgtgttcattctcggttgtcctaatctttttgaataatctccttacttttgaagacatccaattatcaggaacaggaaagaggtaaaatggttttaggatttctttacaatggaaaagtctaacttttaaattaattagaaaagtgagtataactcacgtgcagcttgtggaggacttagataagtgtgggctctgtagctctggggtacatgtagcacacagtacctgatgtgtttggtagacacagtttgaaatctttcacaattaattgtcattggttaaacactgtaaatttcccataagaatctgtaagctcatgttctggtgtgcttggcttgggtagctccacccctggctgtgactggtcagtagcaggatgcctgttttcccacctcacccacctgtgtggttctcttgcttggttctgaaagctggctctgacggtttgtgaaccctgatcaacagcaaccaagattattttctaccgtgcttctccagtcgggtgcatgataacttaagttttgtgaatgtttacctgcaaggtggtatttgctttgtttgaattgatgtgcattctaataggagtcagaaggccagctgatgctctgtgctttgtacatcataagccttactcagctttagtacagtatgcttgattttcagggccctctccacttgactatggaaattgctatttatagttttaatgcttagcagactggttctatggttaagtgcacttattctcattgaatgagcacagaaggaaacgactaggggagaaaggacaagaaacaccatcatgggacacaacgatgtttgaagttttagccatgttattacttctgcttcttccattgttgtgctaaaggtgattattattatagtgcgttattataatgcagtaaagtagtaggcatactttacattaataacatgtaaatctgtgggtagatttcttgaaaattcagtttagtttttggtgaaatctttttttttttgtttgaaacagggtttctctgtgtagccctggccttcctggaacttgctttgtagacgaaagctggccttgaactcagaaatccacctgcctctgcctcctgagtgctgggattaaaggcatgcaccactagacctggcttttggtgaattctttaatttactttatagctatgttaacacactgctggtgtgaacaaggaaggacatagagctaacatttgaagatagtttaagaagtgtgtttgggggctggagagatggctcagtgattaagagcactgactgctcttccagaggtcctgagttcaattccacagtaaccacatggtggcttctggtgtgtctgaagacagctacagtgtactcataaacattaaataaataaataaataaataaataaatcttaaaaatacaagaagtgtgcttggtaaattgtgatatgtatgtgtgcatgtaagtatgcatatacggagacaaggtgtgtgtgtgtgtgtgtgtgtgtgtgtgtgtgtgtgtgtgtcttcctaagtagaataggatgtcctgaagcttgatgtgtagtccagactggctgcaaatttgtgtttttcctgtcccagcctctcaggtcctggggttattgataagcatctcatatcacaccttgatatttttaaacaatatttgagtatcattgaaaacagaaattatagtattttactataaggcttaatataatttatttagtataaataagtctatattttagctttaaatttgaacaaacttttgagattttcttttcctttttgagtagctgttagatctgcatgtcttctgacctcctttaatcaaaagggtggaccaggtcaggttcttacacattgtccgagaatatttacttatcatggttgagaatcagaaatgaagcatgctaccagtagcagtaccagactttctactacctagtagtaatatatgcaaatgtagtttgaatgactccagaccatgcacaaactagcatcccatcaagaaactagaagccattgcatgcttactattgtgatctttacctgttgcctttgaagggtgtttccgctttcgagtccctgagtggtgtgtatgggtgtgagaaactgtaagctactgaacactgatacctttatacagagctggggactattactgggaggagctgtgatgctgaaagaaattaaagggtattttgagtcagattttaataatagcattcatactcaataaaatgctccattttcaaagcatcttcagaattgaagtgataatcattggtccattaaatctgtgggggatttttaattgaaagggaaatccttaatggtataattgctgcctttttgtgattctatccttattgttgtagcagggtctcatatatcccaggctagccttgaacttggtgtatagtggaggatgctcttgagcttctgatacttctgctcccgcctcctgagggctaggattacaggtgtgcatgcagtgctggagaccaaactcaggcttcatgaatgctaggctctgccaactgagctgtggactggccccttgtgactatatttttagaaaaattagttacaaatgataaatgttagttaatcgttctgccatacagtatcaatgatgagctttcataaattggaagaaaattacaaattaaactaaaggttagaagctgaattaccatatgatttgcaaataacagttttagtgacagactagtgtctatagagacagactctatagctgactgctggatttctttaagctcccaagaggaagacagaattgcctggcttctggattaccttatatagtaattactagaaaacaagaaaatatgggtgctttcctcaaatgtaaatgagtgtgatggtaactgttggttgtcaacttgactgtaactggaatgaactgcagtctatgagagattttttgcttggtttgaagtaggtaagtccacttttggtatggacatccatctttaatctgggccagtccttctgctggaagcctgtataaagacatggaggaaagagggttttgctctttgcctgcttgcccttgcctggctagcatatccattccttcattggccttagagcctactatgtctttgggactctagcctatactgaagaccatctgagacacccagccttgaggcctgagcaattactggatttttggactttctgttcacagccagccattgttgcattagctggactgcagcctataagtcattctaataaatcccctttgtgtgtgtgattgtgtgtgtgtttgtgtgtgtgtgtggagagagagagagagagagagagagagagagagagagattctataaattctcttactctagagaaccctaataaaatgttcctactttgtcagatagttcattatggtttagatatgagtgtacccatgggatcatctcttgaatgttggtctttagctaatagcagtattttgagaggttctggaaactttacagaatggaagctaattgggaggtagagtcactaagtacatgtctttgaactttatatctggtccacaatccattttcctcactgtttcctgcccacccggagatgaacaaagcgctccatatgttcccactgccgtggtgtttctgctttgctggaggcctcagtgcagcggaaactcagtgtagcgaagactcagtgcagcagagaaagccagttgaaacttggaaattgagctcaaccaaatctttccagctttaaattgttttgtttagtatttttctgataattgtgcaaataggcttaaccctaactgctagtaactctgccatatggagagtcggcatgtaacatttcttcagtgacagaattcacccaacactcattttccacccttttatttttctgataagtagcgttggttgtggccgtgtgtagacaagtgtgccatgggcacagtggtgagtgggacatagtaattgccttcacgaggcttgtagtgtatccattggaaacttccgactgtttctccctcctcccacttgttcagcacatgggatgctgcgtgtggtgttaatacaaccactccattttgataaatacagtggaaaaggaaagtaccatttgtcttaaaaaatatggcagttttgccatttttgcagtgtttaagcaagttttcttcatttcagtgtgtctctagatttctgttagattcttaccatttgcctttattacctatttttcttgtgtttctagctagttgcataacttaattggaaagatgctatcctatagttctaatttagagatattttaataagctcctagcttctccactttttttttttttgtaattcattagtacatttgatttttgctacacgaaaaaaaagctgctttcctttaagttttagatataaaatcaatccttttctaggggaaggccttagtgggagaacaaaaagaaagaaaatgaattagagtacagaggcacaggcaagtgacactgtgacttcatctgtgggcttgttcactttcttattcttattaactgtagcattgcattttatgagcacatgttatgtagactgatgtgttgaggtcagaggacagcttgcaggagttggttctgttcttccattgtagctccatacagacagtggagtcaccttgctggtcctcaccatcagtaccatttctcagatacccagagagacaggtaacacaaaacaaagcgaaaaagcaagtgaaaaactgggtcacctatcatttgtgttttgagtactgaccccgatgtcagtgacccggagtgaattgtgggcagctgctcatctgaaaagttggtggacttttgtataagccttgcaggcagaattgcttggagaatatattgttattaataataattattactattttgtaaagtgtgaggcgtgtggaatgtttgtgggaatagaataatctttgccctgtcagaacatggtctctaaaacaaattgtgtgagaacttttaaagaaataaagcccaaatgtgtaaagaatgatttatacttcttcaggagggcagattaaattattataactggtaatgtcttcccaaagtgtttgtctaagagtagaacaacatcagctcacggggagaagggcaagcatggagaggagacatggccttgttagctcagttcagccccttggaaaaggctttcatttgtatgcagtctaattatactgcaaaataaaggactgaatccattaacaagccagggccctttgtgttgcctgaatccctttagtttcatggctgcatagaagccttattcagagcattcctaggcctgcagtatctttcctgtctgcgtgccagaccctattcatagtgttctcacttcaggaagttctcacagtcatttggggtggtgtggggggaggggcaagatggggcgctatgaggatctcttttcccttttctgtttcctgctctgtcccttaaaacaaaaccaaactgcagacaaaaagcaaactcaggaaggtagctctaaaggagattctcaaatgacccagtggattgataactccctggaatataacagaaaatgtgtctccttctgggctctattcgtaaacactcggaggtcagatgagagtagcaggcatgggaagaatagatggcgatgtgctccagaggacttatttcttccaactgcatgtacttaaaggactggcttgtttgtttgtttccttaggttgtgttagcagtgaaggtaggggaggagaagccagggactcaggcaagcatcttaaagtctggatgagaagaaaaggaggtcaaagatggcgtcttcctccttgcaaagtgtgacagtagatgttatcctaggtctggtttggaatatgccgtctttcagcagtgggtgcagaactgtgctctgtgaagtggggaggaagagaatcatttagttgtttgagaagctgctggcagtgacttcccagagttaataagtgatgcgtgtgttctgcatcctcaagaccagtctacctagccatagttctggatggtgatccagtggagctttgctttgcctccctccctccctcnnnnnnnnnnnnnnnnnnnnnnnnnnnnnnnnnnnnnnnnnnnnnnnnnnnnnnnnnnnnnnnnnnnnnnnnnnnnnnnnnnnnnnnnnnnnnnnnnnnnnnnnnnnnnnnnnnnnnnnnnnnnnnnnnnnnnnnnnnnntgtaaaggtttcttatattttttaaaaaaagtgtgtgggtgagagtgtgtgtttatttatatgctcacgtgttatctgtgtgatgtgtggaggtgcctgtgtgccagagtgcacacgtggaagtcagagcatgacattggtctttgccttctaccttatttgggtaactgtttctttcttgtttcactgtggatagactataaacttcctcagactctcctggttctcccctctgcctgctgtggactgctggtatattagttactttcttttcttaagattttatttgtgtgtatgggtgctttgtctgcatgtaggtttgtgctcagtgtgtgtgcctggtgtccacaaaagtcagaagtgttttggaccctggatctggacctaacttcagctgttagtgggtgaaattgaacccgggtactctggaagaacagctgatgcttttgaccactgagccatctctccagtctcagttactttcctattgctatgagaacagcctgactagggcaacataaaaaatgaagagtttatttgtacatgttctccatgttattatggtgtgatatttcccttcgagatcatgtcctgagacagaaatgggctggggacaagatatagcccccaaggacctactcctagtgacctacttccttcaggtaggccctaccaaccagagtttccataacatcccaaaaccctttagcaggggaccaggttcttaacagaggagtctatgagagatactgcatgtaccttcatttgggtgccctagcacgtagtgggactttaagagtctcatgtgtcacggttctcttacagcatcaatgactgcaattgcacaccgtaacccaggttttcaacttcaattgaccctgctaacgcatgctgcgacttgtactgtggttgttgacttatcttctcacaaattagactaatagcagtgtggtttatggttttggctttaaaaagtttaggtttttttttttttttttttttttttttttgcttgcaagtttaattggaaaacttggtagattttaatgatttcttatggagaagaaaccacagtgccttttgaacctcaggctattactttttcttcagaacaacacttttggaggtggcttggctggttatttccttgctgtcacttattacagattcagtaaagactgtgattaaagcatttgttacatgtgattagctctctgcctccaccgccttgtctaccactgcagctgtcctgaactgctgttcttccatcttgccttctgcagagtggggagtgtgcccattgttctttgtcttggcgtctgatctcttggttgtacttgggttcttgctcagctgtttctgtcctgctgtggaatcccttcaaccttgtggaacaggcgttccctgtcacctatcttggcacgctggcagactggatggctgtaaatgctggggtggaatagtatgtgcacatgtccacaggtctattgtaggaaccctgtcttcatgtctggtcactctgaaagatatggaggatggtgaggtcgcactttaattttctgaacttccttaccttaaattaaaaagacaaacaaacaaataaccataatgacataagtgttataaatgtgtttgggtgtcaccaaaggctttttggtaagaggatgaatagatggcagcttgaacagtgttgagaggtgcagtgctttgaggagtatgaatagactgagaggtgtttaagaaacttagctttggatccacaaaggcagggcctcctgtcagatgtatcagggtggggctgatcagctgttctgtcaaagggtcatggaaatccttgtttgccattcattttgctgtaaggatagcaatggcatatgagtgtactcaattctccgtataaatgggaagaaaacatgtaggtttaagtcagttttacagtatgtgacagaaagcattgagttgctgtgtctctttaggataccttcaggaccacagcaggtttcagcaattaacagcttttgtttttgagttagctgcctagatgacagcaatctgaaatgacatatatgctcatttgaagaagtgtcttctaaaagacaacgttctgctaaacagctaataactcccaaatgattttactgttgtcgtatgtatgataaaggtgtatttcttgtgagtcttgtgtataataattgtggagtggagagagcttttattgcatgggataccagtggagcgaacactccctggcacattacctgttgtcaaagagcttcagcgatcatacagagttcaatccccagggagctaggaagggtaattctgccaagtgcccaggtgaagggaccctacagtgtgggtcatttaggatatttggtggcaagtaatggagcccaaatcaagcaaagttcaacaataaggagctttattatttcaaaatgtggagaatttagaggctggatccaaaagtgtgtggtgccggcagtaactgagagaggtcactaggttttaagttcctgcccagatctgccatcctgagtggagctttgctctcagctgtgtctcggattatagtggttagagaaggagggcttcaggaagaaactgccattcttttctccttagtgaaatcattcctagaaacacacagggttcacatggttcacttttaaaaaaatattgtgtcatgtggatgaatatttgtaggtatgtagtacatcacatgtgtgcctattggatcctatggaacatcatttggttcatggaattttaacatgggtcttctgaaacagcaaaagtatgtttaagcagctcctggaaggactttcatatggtcctttttaaccagctactgtgattagtttaaaaatcagaacccacttgttggagggagggacagggttgactgacattctccatatggctatatgtggatggtcaacagaagtgggctttaatcaagaaggggattgtagaatgagctgccagtagcacctgccttgctcattatggtgtgagtatgtgtgatgtaggtgtttgtctctgatggcgatgagatgctcatgtctgatgagtgtaaggatatgtaagaaggtgacttgattagacaagggtggctttaacctgaccttcagatagctcagcagatacagtgaatgaacttatgtcatgtgcacgctgcagcagtaggcaccaggttgagtactacagaaaagacaaggtctgcattcttgcaaatgtataatctgtcattagttacacacttctgaagcaaagatctatgtgtagcaagcagagattgagcttcctgtctaggtgagataaaactcaaacacaagtttagtttccattacatttcttagtattagaaattagtacgttacactgacttcacttgatgtgcttctgtttttttgtttttttttttttttctttgagattctggagaagatgtgttctaatttctcgttacctccctgatgcaggccacactgacatgtgttctacccatctgtacttggtggcctgttttccctcagtgaaaaaccttaaggttggaactttacttttttatcaagcctctgaagtacccatgccgagtgttgattcctaacactgcagtggactgtatttatagctcttcttttatctgcattctttagtacagccactccctccccccactgttctcagtcagcagggaaacatggactgccttggagtgctggcttgcctcaagctgccctggttctctttcctagtttacagctgtcagcactcactgtatcttgcattttaaccttatagacatacagactgtaaacagatcaacggaaattaccattcatgcatattgcctattaggctctgggcccttatggcgttcattagtagttccgaagcaacgttttgtttttgtttttgtttttgtttttaatttgtgtgtttgtgatttaaaagaagtatgttctattgcttctcatttatataaagtttcaggttagggacatttttagataaataactatagagtttttatgaatgtaaaatggcctgttctccaagtgcttgaaaaaaataccagtagaaaagtgatcttggtgttcttgggagtagcatacaccccccctttcataatagtaattttctctcttcaatctgcatgagaacatataaaagcaaaccatactataccctgggcatccagtcattattaacaattttaaaaaaggaaatataaaattgaacatctcgttgatgacaggtgagctgacatttagaggatggcggagtggaggtgaatgtgaacaggaccactgtgagaggtgaggggtccctttgccctgagccctgcagtgtgagctcttcctcctgtggccaccagtgcttgccttcctctccttcctccctcgcctgcgctgtttctgctgtttcttcctcacccattgtctttcttcctttggtttttggtgtagttcagacatgaaatgccattttcttaaataaatttacaatgcatgctactgagtgaactattttcttaaatagactttctttccttccttcctccctccttcctgcctttcttcccctcagacttttgcccatctttttgaaagtgtgtcttctctttaaggacaagctctgaatgcggattgacttctctgctggtgactccagtggggacgatggtcaggttaggtgcttgtggaatagagattctagttgaatactgccgttccccactcttagaaaatcaaaaaacgaaaacaaacaaaaaaaacagtaagtgtttgactcctttatgtttgtgggtcaaaattataattcatgtaaaaatgttcatttgtgagtactttgtggaaaatatagaacagtctctgtgttcatggctgtattctgaattttttttctttagtttaatgtgcagagtgttttgcctgcatgtgtatatatgcaccacatgtgcttggtgtctgcagaagtcagaaaatggtgtcagattccctggaaatagaatcacgggtggttgtcagtcaccatttgagtactgagaactaaatatgggtcctccacaggagtgacaagtgctcttagccactgagccatctccccaaactcagattttaattttttgagaccatttaatgtactccaggcttgccttgaaccttgtatggagctaaggatgacctgtaatttctgaggctcctatgtgtacttcctgagaattataggtgtatgctaccatgccctagccatagtagcttttaaaaaacaacaacaacaacaacaacaaaaaaacaaaaacaaaaaaacaaaaaaaatcagtaccactgagcataatttcagaaagtgacatggagtcactcccaagaatattctgagtctgtggtggtctgtatcagaggccatgctgcctatagaggaaagaacataggtggaaagaattgaggcctgaaaaaaatgtttggaaaaatagatattttgaaacattaaaaattcttcactcatctgtgcaatcataactgttttctgtctaagttaggttttgctttcagggattctgctgtgttatagctgcagtgtttgggctttattcataaacacaataaatatgcaatagatcaagaacacatggagagctagagttggctatgtcagctgtggtctggtttgcaattttggcttttttctttcttttttttttttttttttcatggaactcttaaacatgttaaatgctcattttaatttccagatcttgctttacaatgtaaccccactgacaaatttactttctttcggctctggtttgttggttaaaatcgagaactaataaaaaatggctaattttatagtataaaaattaatcttgttcaggcttggcgatgctgtagagactctgtggctggtatgtgaagaattctgctaaaggttgactttgatcataaacaccatcttgtcctgcccttccctccctctttcactttgtgcaccttctgagaggttaaaaacagatagccaatgactaattcaacctagaccaaacaggtgtgtgtgttgggccatttaattttatattttcagttgtcttgccccttggcttccacacttgactacttcagcttgagttagaaatggtgaatgtgctcccagcacactgaagttgggcactctaaggggctggaatatagtgggcaatgcatatataatacagtacaatgtttaatttttaaaaaaagtttgtattatctaaactgggattggaaagagaaggaaggctgggaatgtaggagctgcctctttagacagtgagcagtctcctgctcccgccccacggaattccttggttttgtatgatatctcgctctaagtgcgttatcagcctgctgacagcacttcagaagtatcttgctgtataggtaaccccttttagtgaaaaatagattcatttctacataatatatcctgatcacagtttcttttcctctgcttcccccagttcctgctcaccttttcctactccctttctgtctcttattacaaaagaacaggcttctaagagataacatattctaacaaaataaaagattgaacaaaaactgtcacattgaagttgaacaggacaccatcagaaggaaaagagcccaagagaaggcacaggaatcagagatccacttatttgcatgctcaggaatctcatttaaaaacaacaacaacaacaacaaactactggaagccataatatatacatcagaggatctagtgtaaacctgtgtgcttcagtctctgtgagttcatattagccttgctcatgttgatttacagggctttatttccttggtgtgctccatcccctctggctcttagactatttctgcttcctcttctgtgggattccttgaactctgaggggaggaatttgacggatgcaccatttaggacttagtgttccaaggtctctctctgcataacgtctggccgtgagtctctgttcttgctctcgtctgccgcaggatgaagcctctctggtgatggcagaatgtgattaggagtcgtttctcactactcccccaccctcctctttagaccagcagtatttgcttttaccctaggtcccttggctatctagtctgattcgtggtcactggagctataatctatagaaccacagagggtaggtatacaataaggaactagagggaacagatggatctcattagggaagggaaatagaatagataattattcatgtatgggagtggggctggaatgggaagatcaagtgggtagagaggattgctggcaggaatatgggaagagacagataaaattaaggggtatttgagggatagtatagaagcctaacatagtagaaacttcctaaaatgtgtgtgtgtgtgtgtgtgtgtgtgtgtatgaaggctatctaaacgaaatcactaaataatgggggagacaatgtcccagttgaccatctcttgtcctcagaggaagcttccagtactgggattgggttacatccaactggttgtttaccaaagagatcccgtgggaacgcaaacaacccacgctgaggctaagactatagattgctctccataaactgatattgaggccctattgctgaaagcaacatctatacaactcagtgaacttggagaattggagctggtgcctatgtcgagccttcatccctaccttctagagcctttggtgcagggaggtactctgcaggcaccaaaggaaaatataaacaccaacccagccaccaacaccttgatctacaatggtttctgcctgaaaatatgccagggcaatggtggcacaaagattgtgggagtaactcatcagtaactaatctgctcaaggcccactccataagctggagccctcctgacacagcttatgccgtgagcggatggtgtttggggccaggttgaaatggttttgactcgtgtgttcaccacgtgtgttctgttttccctttccaagcttcagcttcctcctcagagaatgtgtgctttccatcagtgcgtcagtggctagacacaaggctcctcctatgtcttctgtttttcttttatttctactttcttccaactgtgtattttattattattattttaatcttttacgttgtaaactagataacagtttaattttgttgggatttcagagtttgtaggtaaatatcaaacaaattttatgcacagctggattttgtctcagcttaatgtgcctcagacttgcaagaaaagataaaaattgccatgaggggctttgagtttacatctcattggcactattaacaaggtgaggcctgcagatatgcatgccaaatgtgtctgttatggtggagaaaactaggccctgagtttgatccccaggacccattttaaaacagccaggcttgtaatcctattggcaaggtaagattaccttgcctctatctgcaaggtagaagcaggcagatctctggggcaagctgctcagcaaatctgtctacatggcaagttccaggctagtgagagacttgagcccccaaaataagtttgagggcacaatacaaacacagaagcaacacagtgtgtttgcctaagtatgttaaaagtgatttattgaggaaaggagatgagcagttcttttaaggttaaatagaagcagcccacagaattgctctggaatgttgtgggcatctctgggtttcctagtttctcctgtccctcaacagggatttggacagagcacatgaatagtgacctaagaggaggtatttttttctgagggataaaagtacttggggtggaagtggccagaccctgagaaagatcaaagctcaatgcactgggcccagagagttgtcagtgtgttgatgtatcctttacacagcacataccttcacttgtgtatggctggcttctctcccatgtgttatgactcctacctgtaccttatgctagggtggggggctccagactgtttttttgtcattgctttcttattaaaacaagatttaaagagtaagattaaggtaggtctctctcaatatctctcaatcaatctctctctctctctctctctctctctctctctctctctccctccctccctccctctgttttgagacagtgttactctgtgtaggtctggttgtcctggaacttagtctatagcccagcctggtcttgaacttagagatcaatcagcctgcccctacctccccagtgctgggaccaaaggtatgcaccactgcccggcagattaacttgtattttaaatgctcagaacttgtgggtatttaacttgtatttaacaaaattataaagttatttatcagcactgattgaccctagatatttctgtattcagcttgtttctgtagctcttaagagcaagcaaacaaacttaaaatgctcactaggtattattctagaaaccatttctgtttctgtgatgtcctgtgctttcacggaggtttacatttagagttttagttttaaaaattaaaacactttttaaattttatgagtttgagtcttttgaatacctgttatacatttatagtctcctttaaagtagtgacggtatatttttactataatagttgtgatagaggaggaggtgggaaagagtgcttttaccccggacagatgacttataaagtaaactatctaaaacagttactttaaaaaaaattaccactttgcaactaaatccacaaaatctagcccagtgattcatgtatctggttaaaattttccttcagaaaatttccaagtatagacttctttactcgcttaaaaaaattgatttatgggactggagaaatagctttgaggttaatagaactggttgctcttccggactgctctggtttaattcccagcacccacatggcagctcacagctgtctgtaacttcacttcagggtgcctggcaaaacaacaatgcacataaagaaaatgcacttttaaaggattaattttattaattatggtgtgtgtgtgtgcactcgcacatgcatctgtctgtctgtctgtctgtcttggtgtgcatgtgaatgcaggtgcttctcgaggatagaggcatcagatccctgttgacctagagttacaggtggcggcaaggagcctgatatcctctgcaggccagatgctgcctctctgtctctggaagacataacgacttctccagactccctttactccacttttgatcccaagcagttgaaactgttcagtgtaacaacctgcctcttcactgttttgaacattcttttctctacataagtcatcttctgagataattacagtgttaaagacccatccctgtgctctttgatttctcctggaatttgaggagaactaggtgccacctacaagtgggagatcgccactcacttttcctgtgggttactggcctttagctatttagtcagcgttgtacgtctcacgcaggaagtgagtgtcccattcagcctcttagcagactggactgactcactggtggaccaaagccccagcctactttaccatttcctccaggtcccttctcagtggtgctttcttagccctctcctaaggaggagtttcttaattttcagagtcagtcattccacacaattctgacaatgatggttgtacctccaccttagcatgtgtgggctcgtctgtcatgttgatgccatcacattttagattcttggtcatttcctttttccatattgctgccaaagctctcttctcttctcttctcttctcttctcttctcttctcttctcttctcttctcttctcttctctttttttctttctttctttctttctttctttctttctttctttctttctttctttctttcttccttccttccttccttccttccttccttccttccttccttcctctttcaaatatttttctttattctctctctctcttttttttttttttttttaaagacacggtctcactatgtagccttgattaggttggaactcaataagtagaccaggctggccttgaactcaaatagcttctcctgcctctgactccagagtgctggaattgccctcaatcccagccaactctgtccagttttcttgaagatcacctctgatatccctctccactgcatgaagtattggtctccaagaaagatcctttgtgacactattcactgggggagatgtgcacagatgtctcctcacctcaggtaggaaactgatgaaagaccaaagtaaagttgctgccaaagttcaacttggtgaacaaacaagttttattgtggttctttatagaaatatggatgaagggttatttataggagcaaaagtgactcaaagacagctatatcaccaaaagcctacccagtatggatggcagctatcaaagctagacacttagaacacattgcacagcgtgcacacagccctacaggttgggtggtatcctctccaggtagcttagtgtgtctgagcctctttctggaagctcattgggcctttgttcttgcagggagtagtctagcctgagggcctcctcgtagtctttactgcctgtttattcttggacagtttcagggacttcttgaggcctttgagtttacttcaaaagcttaaggagcttcccagcaggatggaatagtttcctttagaatatcctgtgtcttacagaccttccctccaataccacaacaaaaatacagattcatctggatataggaagaaacaaataagatctgcagttatcctgaagaactgcttttaaataatttcatgtgtgtgttggcattggtaactttggtgagtctacgactcatggtatcttgatatatcttgaaataacactggggaagagtgagaggagaggtagtggcagtagccctctattgtcttttgtttcttagcactttgcagacagctttatatgcctgccaaagtctatttctaggggatgccagttagtttttgttaagcaagtgggaaagttatgtagaattgctgacaccaatacaagatgagtaggaagtagaaggaaggaagaacgtgcaggggagtgagaactgtgcctgcacatcttaggagttgcaggtgggtatgaggtcagtgtgagatccctttggcgctgtggttgaggagaacttcccgtggtttccactgcttgcctgtattggatgggcgtttactgggagaaatgctcccagcttgtctaggaacctccttcccacaaggatgagaaatgatttacctttcttggggttggataaagattctgggccatataattaggtccttcccacagagccgcatgctgcctcgtccactcaggctctaagctatgaggggcagatgttggcaggaggtctcagcaggctgagcagataaatgacaaacactgggaaaaataataagctacgacactccgactgagctcggccacttttcaacttagcttttataaaataaataagattttagaagtcttattcttctatttaaatttcccatttttctttgactggtttggatttgggtagggcaatagggccactaagtattgaatctcttagtttaacccgaagaagctcttacctctgaatcaaactactgaagccctacttcttaagactatacaattagatttttgttttattttttccttttggaaacaggatcctaagctgttcttcttgaacttgtgattctcctgcaccagctttctaagatggcacacacttgggattgcagggtgagatttgcatgcgtgtatgtgagtatagcaaatgaaaacgtgcctgggcttgaggttgggcattggtttctagaactgtaaatcaaaccaaatgaaacaaaagctcatttttaatataaacttggtatcagactctgaattatactattacagcatcaaagatcatgcaaatgaagaaataccagatcaataaaattaattttccaaaagaaatggcaaaagtataagtaatatgttttattagaacatggaaacctgaaaccacagttcctactgacgcttgagcaagccttacaacctgcaagaattactactgtatagaccaggaagaagagcattattggcagtgctttgttggttcgtacctttccttgtatgtgaaaagacagcacacatatggcagcagccagttctgttcttacgagatttagatggactggttaatggcttaaagcatgacacgggtggcataggtatgaaatctgcagcaatgactcacaagaatgatcatggctagagttttagatatcaggggttgaattgcccccccccccccatttgtattttgattacatttctgaataggtaagtaggttaacagcagaaattatctttctctaccctgtttagtttaatggaacacatagcaaaacaataacaacaccctcaccctccctacttaaggaagtagcctcttccacatatgctgcctcagccataaaagagtggatatgagacttgagttatctatcgtaagctcttaggagaagtatgaaaaatccacaagtgccagtatatctgggaaaagttttttttttcccccccaagagtccctgttttgtacatttgattttattttttttccttttttgtaattttaattttttattcactttgcatcctaatgacagttccctccctcctcttttcccagttccacccttacagacccttccccctattgcccccactgcttgggtaccaccccaccctggggcatctagtctcagcagacctaggcacatcctttcccactgaggcccaaccaggcatccaagtagtggggaaggggatccaattgggaggaaacagagactgagatagcctgtgccccacttcttaagggacccacatatagaccaaggtgcacatttgctacaaatgtgtagggggtctttaggtccagctcctgcatgctccccctaggttagttgacactgtggattttcttgtggtgtccttgacccctcagacttgctcacttctatccctcactcttccacaatactccttgggctctggttgatgtgtgggtctgggtctctgcatctacttccatcccctgctggatgaagcttctcaagagacagttatgctaggtccctgtctgcaagcatagcaggtatcactaatagtgtcaggggctggttctttctcatggcatgggtctcaagttggggcagtcattggatggttgttacctcatactccttcatcttcatccctgcacattttgtaggcaagacaaattttgggttaaaggttttgccggtggattgatagccccctctgtcctctggaagtcctgcctggctacatggggtagccacttcagtctatataaccccctctgataggaatctaagctagagtcactcccatatactacttctatcctttcccatcccaggccttcagttagtcaccagagatgccctctctacccaggccaatttccattctcactcccagccttctctctccccctttccccacaccagatcaccattccccttctcctccccacctcctctcctacccaggttcctccctccctctatctccaatgactatttagtttccccttctaagtgagattcacccatcctcctttggggcttctttataatctagtttctttgggtctgtggattgtagcatggttgttctgcatgtaatggctagtgtccacttatgtaccatacatgtctttctggctctaggatgatagtctcaacttctatctatttgcctgcaaaatccatgatgtatttgtttttaatagccggatagtattctattgtgtaggtgtaccacattttctttatttgtttttcagttgagggacatctaggttgtttctagtttctggctattatgagtaaagctgctatgaacatagttgagcaagtgtccctgtgatatagtgaggcatcttttgtgtatatgtccaggagtggtatagctgggtcttgaggtagaattattcccagttttctgagcaaccatcaaatttccaaagtggttgtacaagtttgcacttgcaccagcgatggaggtgtgttccctatgctccacatcctcaccggcatgtgctagctcttgagcttttggtcttagcctttcccaggtgtaagatggaatttttggatccttttggtttgtgtgttcctgatgactaaggatgttgaacatacttttaagtgcttctcagaaatctgggattcctctgttgagaattttgtttagcactgtatcccatttattaattgggttatttggattgtgaagatcttttcccgatctgtaggctgcccttttattctattgacagtgtcctttgccttacagaaacttttcagtttcatcaattgttgatcttagagctgagccattggtgttatggtcaggaaattggctcctatgccaatgagttcacaggtattcttcccactttttctactatgagatttagtgtgtctggtttgatgttgaggtccttgatccacttggacttgaatttagtacagggtgataaatatggatctatttgaattctcctacatgtagacatctagttagaccagcaccatttgttgaggatgctttcttttttttttcaattatttggatttggcttctttttcaaaaattaagtatctgtaggtgtgtaggtttatttctgggtgtttgatttgattccattgatcaatgtgtctatttcttgtttgtttgtttgtttctttttattttatgtatgtgagtacactgttgctgtcttcagacacaccagaagagggcatcagatcccattacagatggttgtgagccaccatgtggttgctgggagttgaactcaggacctctggaagagcagacagtgctcttaaccactgagccatctcccccacaccctcatgtgtctatttctataccaatatcatacagttttgtttgtttgtttgtttgtttgaatcactattgctctgtaatacagcttgaagtcagggatgataattcctggagttctcttattgtagagaattattttggctaacgtgggattttgtttttccaaatgaagttgagacctgctcttcaaggtctgaaagaattatgttagaattttgacaatggcattaaatctgtagattgttttggtaagatggtcattttcactgttcatccaactgatccatgagcatgaggaatcttcattttctgatatcttcctcagtttttttcttcagagatttaaagttcttgtcatacaggtccttcacttgcttgattagagttacacaaagatatttcatagtatttgtggtcattgtaaagggtgttgttttctaatttttttcttggcctttttattgtatgtataaaaggaggactactgaattttttttttgagttaattttgtattcagccactttgctaaaggtgtttatcagatgtagaagttctctgctagagttttccttctagtatagtctgtagggctgtatttgtggatgatattgtctaaatttggttttgtcttgaaatatcttattttcttcatgagattttgttgggtatagtagtataggttgcattctgtggttttttttagagaagacttctgtccaggcccttctagcttttagagtctctgttgaaaagtcacatgttattctgataggtcagcctttgtacgttacctggactttttccctttcagctttaaaatatttttttgtttacttatacatatgagcactctatgtacatctgtgtgtcagaggaggtcattggattctattacagatagtcttgagccaccatgtgggtgctgggatttgaactcaggacctctggaagaatagccatgctcttaggtgctgagtcatctctgcagcccttccttgcagcttttcatattcatttgttgttgtgagatttattgttatgatatatagtgggaggattttcttttttgggccctgtctaattggtgttatgtaactttcttgtttgtttataggcatgtctttctttaggttgggaaagtttacttctatgattttgctgaaaatatattctggttcacagagctggcactcttcaccttcatgtattcctattattcttaggttaggtcttctcatggtatcccagattacctgggtggtttgtgccaggaactttttagattcaacattttctttgatgtatcagtttctctattgtattttctgcccctgagattcttttttccatctcttgcattgtgttggtgatgctttcatctgttcttcctgtcctcttccctaggttttccatctctagggtgtgtgtagtttactttacctgtctttgttctggaaaggcaacactacctgtctcctctcagcttaccttgaatcctcgaattaaacacacacacacacacacacacacacacacacacacacacacacacacacacagttgttccttttcaacttgcttttttggcacaattgctgggtgctgaaaaggtacccttaccaatttcttatttccgtctctcctacctgccctaagtttcagttgctaaactcttgtgaccacctgcctgtaggagcagccaccgttcactgctccccctgagacctcacatggttgcctggttctcctctctcctacttctttttccttgcatctccattttcttcccaggacctggttttctttactgacaaatcaagaaccaattggggagcaggacctcagcatcagaactatccttataccaggataccctaagtttgtgttttctttattgcttgtatctccattttcaggctttgaaaagttttattcatttcctttacccatttaattctattttcctgcatttctttaagggatttattaattttttcctctgaagacctgtatcatttgtataaatggatttaaggctattttgttatcctttagttgtgttaggctattcagggctttctgtggatgtgtagctatgctctgaaggttattgccctgacttttgttgcttgtgttcttttgagggcctttagccatatggttgtccttggatgttcctcttgttgcaggtattgggatggggcttaatcttgatcctgttgtggcaagccactcatgggtatccttgggctggacagtggaactcaggtgcaatgtaaatcttccagcagttatgtgtgcccctggggatagggtgggaaggagatggggggagggaggcaggtagagaggtggaggtctgggggagagctggccactcatggtagctaggcatgccccagaagactcagtgggcaggggaaatggttgcaggaagggaatctgtatgcttccagtttagcaggtctaatgaaggtgggtggagaggtggctggacagtggaggtccgggggacaatagaccacttagggcagctgggcatgcctcaggggtctcagtagacaacggaaatggatgcatgaagggaatctatcattcatggttctagattatcaggtctgataaagatgggaggagaggttgccagatggtggaggtccaggaaatgtatcaaaaaaaaaaatgtaagtttaaaagtcttgaaaggtacaatgtagaagccatagcttacaaaaaatcttttagctgctgtgattaaagaaaaaacaaattaaacaaacaaaacacattctttcatattctttaagccctagaacagtgattagacaccttaagcatgaaagggactgggtggagaatatcccaaaatgacctgggaggcaggaagtacagtgtcagtttccagtgccattggctaagcgtagcgtagtggagttcattactctgggaaatgctctgtaaacaatagcagtactgcaaaaggctctgtatggcatgagaaaattcaccacaaaatttgctgaatatctcaaattgataaatacctccttgtttagacataagtctaccaagtttggttgtgtagctagaaatatgcagctaggaagaggctgctataggcatttacagggacagtatagaaaacatgtaggtagagatgccagatgatgacctaacaagaaattcatactgctttaagtctttaggtattgaaattataactatcttacagacatccaaattggttgatagcctatgttctctggagtgatgggaagcagatgtagttggcaatgtgttatggtcactgctgctctccttgttcatcagagttggaaggaaacacacttttgaatgtgtaatattccattgtataaaaaagttgttaaaactaaagatcacggtagattgagctcttagaactacttcacatctagagattattaagaagtgttcattcatgtagcattgtgtgaggacttcagaatctatgtaactgaaaggttaaagttaagcataattagaagttttagaatagaaatatacttaatactgaaatactaaaacttttaggcttctatttttaggcttcttatgtattttctctaaacatttacttattgttattgtgtgtgtgagtgcagccatgcttgtaatacaatgtgtgtgtttgtgtgtgagtatgtatgcaagtgcaagtcagagaataactgtagacttagtgctctccttccacctttgtgtggattccaggaatctccctcagctcaccagggctggactgtaagtgactacttcctgaggtgtctgagcagctttagcgctggatccactttagcgctggatcctgtcttccggcattgcctagggttgctcgtcacgtgctacagattacttactcagggcagacttgtttcctctgaaggaggactcttttacactacactccaggctttgttgtttttggatttaacacgaacacatttttgttggtgccctttgtttggtgtcttccttctctgatctattttcataatgtcacatgtattctaaaactcactctgttcatgttactactctcctgctgaagagtcctcaccgaataaccatctcccaatagataccttagccgtagatgatgtccttttatggaatttccatgttatggggtgtggtgagaagggacgacatcagttagtgttcccaagcttggaagtcagaggcatgacttttactatttatgacatcttatttctatgactcatattgttcatatagtgcattttacagtatcctagcacctagcatgctgttgtgacacaggaaacttcaggacctatctcttttgggggatgggtaggagggagacgctttcagggttaaaacagatatcggggctggaaatgactgactttaggagtatagtatgcaccttgtatatttgtgatgtagtttttaaaatgtaattttatatttggaacccctaaatgtaaagagaatctatgagaggaagtataaccttcactgtaattagaaagtagcttttgaactggaagttgaagatgtcttgagaatagtgaggatatttattaatttgaattttctctgatgttgtatactgaggcaactctgttaagcgctctgctgttgttttgctttgagaaacagatttctaagaagcattgttgtcttggtcagtgctctgttgctctgaagagatggcagccaggcttctggagaagttgagagttctgcatctgacaccataggcaggaggagagagagcctctgggcctggcttagacttttgacaccctcctccagtgacacaggtcctccacctaggcatctccttatctttcaaatagtgctactccctgatgaccaagcattgaaatttgtgaacctaggtggggccattcttatttaaactagtatgattgtaaattcctagaagtacatatgcacttgttcaagttaagtttattatttagtgggctcttggcggtatcatatttaacttttattactgcatcctagttaatacatagaccaggtgcccaggaaaaagaacaatgcagaatgtgggatatcttttagtttattgacttaccatccagagcttgatggtgtggttaggtttagagttgtatcttagcattttgctcatgatatgtaatggaaatactttaaagagatgttctcactcccgtgtcgctgggaagttagctgtggcttgcacatcttctcttcaggggaggattgctgtggttgtaaaaactcaagggtggttagactttgtaattatctggttgtactcatatataattagatcctgctgtgcttctatttaagacctccaggggtttcccattgtactgagaataggacacaaacaccccagcaggtcacctgcatctgctctcactcagacctggtacttcattttttccttgcttcagccacagcctctggctcccaagtgtaccccagcccaggcctttatacttttgttctaatctgcttctgccatttctgtttttactcctctttctttagacctgtatacccttttcaggtggaagatcattgttaaccctctgagaaaaggtctttatcagtctctgcttcccagtagtcacgtgttccattgggctacttttattgtctccttaatacacggcacactctcataggtcagtgacagcatttacatttctgcttgcttatccaatcactgtgatgatattcctgaacaaataaaacacgatggctgttccctaagtgctagaagagataaccgtcatcctcataattattctcattgaagtaaagtgacttgtcaaagccaacttacgactaaacaggtactaattcacatagttgcaatttagattactcaataatcgatctatcttttcattatgcagtccagaattcaattactgtagaaacagatcctcttgtatctggagctggtgtctctatataacggcctgtcttacatttgatttgctatgttgtgatttcacttctttccagctgtttaacacagatggttgaataataattgtctttttaagaaattcatattaattccaagacattgaagacttcttgctcctgtgtgctggtttcttgttgaaacactgagagcagcaggaccagactccggaagctcagttccccctgtgattctgctggcaccggctccacatgagaagctcctggcttgcactttcctggttcataacatagtagggcccaacaaaatgattgcaaatatctgtctttttttttttaacagtatgtaattctgtaattctggacataacccagtcttttatttattatctatctatttatttgcattggagttcagcagctgtgatagttgtccagagagcattacgcttttgcaagagtgaaaagtcaagtttgtttcatgtagctgagcatgaaaacatctgaggaatccagaaatggctacttgtattctttcacttcagatgtcacttctttctggcagtagctgtagtaaggataccatacatattttatggaagcactgacttggaaatagtgttagttaactaaatagtaacagttacctttagggagcttatttgactttaccattgttcaaggatccccactgtgttcttgggtgagaaatcatttttggataatatatgtaattttagcctaacgtgtctgtttattttaaaataaaaatccatattataaagaacgtacaaattaaaacatctcagaggtagattgacatagctgtttgtgttattttatacttattgcagttttatcttaacttggctagcatccaagtaatttagacaggacttactatatttaacagctttaaggcacaacaactgagcagtattaatctattttaaccctgtaaagtaatttgcctacttcccaaccaaaatccccaagatacttgaattttatggctttctcggtgccatctgttttcttttgatgtctcctggaccctttccctccaggctgaattcccacttcctctctcttcctccctgcccctggctgctctctcccttgttcagttattgggtggttaattctttattgaccaatcagagaataattagagagcaatgtttacacagcattgaggcagaagattctcagaataaggatggcaaccatatatgggagcacggaagttggcatttgaacaatacaaggacagtctttacatagggcaggcactatgtaaacattatgcctacacacagcaactcaatgagtgcttgagtagacccaaagtttgcacatgtcagtgaccttgtgtacaattaaacaacacttcagaaagccacagagcttctctttggattttacactttcactgtcaaatagctttgtattcacttatctctgtatatctgtcaccaaaccaaaactaaatcaaaaccaaaacaaacaaaaacaaagcaaccctaaatttctacaacagttaaagctagaaaaataatcagatttgtattctccttcagaactcgtgtgtcctgtacgttcttcatcccccccccccccacacacacctgatatgttctttcttatcctccctgctgcatgtggtacttcctacatgtacacactttgactctgaatgtatgcttgtataggcaaggctccacatatgcgcaataccttgcaatttctctcttcctgacattggtggttttgcttaatactatatattctatgtctatccattttctttacaattttgtgatctcatttttctttagagcagaatagtattccattttatatcatttatcaggttttcagtatccattcatctcttgacagacagctaggtgggttccatatccttgctgcattacaaatacagcaacaataagggtacaaatatctctgtggtgtgatatagagttctgtgggtatatgcccaaaagtgacatagctaagttatgtagtagttctattttaaattttttgagcaatttccaaactgaattccataaaagctgtattaatttgcatccctaccagcagtgaataaggttttttttttataatttttttttgtaaattacaaattgtttgtttgtttgtggaccagggtttctctgtagcctttattgtcctggaactcactttgtagaccaggctgacctgaaactcacagagatctacctgcctctgcatccaagttctgcaattaaaggatcatgccactagcttagctacattaccaattttaagaaacattatagaatactgtgttccgttccatattctgtattgcagtagccctcacaacctgttgacttaccttttatcatgtgatatgccctttcacaaccttctgataaggtgggacataagaaaatttgaaatgcaattggaatccttaacaaggtattgccagtaattttaaccctctgaggttgtgtgccaaacatgcatttagaggtgacaggtagtttatgtttgtcaattgagaaccctggctttagaataaaaatagtctttagtctgaagattcattggctattgaggtctgagaaaatgatataacttaaaaaaacaaaaccaaaaactttatatttaaagtgagattggtaatatttgcctaataggtttttgtgatgacttaaaatctgtttcatagagactcagtaactagtggttttagaaaaatgtagggcgcacacctttaatcccagcacttgggaggcagaggcaggtggatttctgagttcgaggccagcctggtctacagagtgagttccaggacagccagggctacacagagaaaccctgtctccaaaaaccaagaaaaaaaaaaaaaaaaggaaactgtaaatgtgggccagagggacgctcagcacttacttgtcttgcagaggactggagttggtttctagtgcagcactcaccatcacctgtaaatccagcttcacgggatctgccaccctcttctggcctctgagggcacccacacatatacagaaataaaaataaaaataaatattttcaaaagagaaaaactgaagtattagtttaaacagttgtaactttggtgttgttttgcggcagtgttgcatttctgtcctgctcactgtactggatagtttatgtcaacttgacacaagctagaatcacctggaagaggaaacaggaatcctatcagactaacctgtaggcatgtgtgtggcagtgccacccggatacccatgggtctgggctttgtaagaaagtacggtaagtaagccatggggagcaaggcagtaagcagcacttttacacggcctctgcttcgcttccacgtgtcttccctctgtgatggagacacgttgtaagctgaaatgctcgaattgcttttgctcgtgttttatagagtaacagaaagcaaatgagtgcatttacctaagctgctttctgagcctacttctggacagcagacaactgtttgcactgtttgcgcagatcccgtccttccttgctagttgggagtgctgtcttctttctgtccaccttagctatgtcctgagcagtagccttgctcctagttctacatcaggcccttcttgctctgataacctgctgtggcctgttcctgactacagtctcaactgctgcagtgtgactttgagatcctcttctggcttcacctgaaaaccagtgtagctagaggtaggtaaatgtatgacctcagtttctttagatttgagacacgcttttcttatgcctattcagctctggttttaaacttgaatattccttaaaacagtctcatgaagagaaagtgatttgctctgtttgctcgaaaagaatgtgtggtcacagattttagttagcttgggatatgcttcagaagtgttcagttgtgaattctgacacttggcttctctgagaagctgagctgcacaattgtggagtgcgaggtgccagttgccgctgtcacagctgtccggggcaatgccacagtcagctctgtgccattgtcaccactctctgtgtttctggtgggaccatggcctctctgttgtcctaaggcctcttgtaatggtgtattttcggccacacttatgatttcatgcttttcagacactaaagggtttggtgcgtgacaaacatttaaattgatgttttctttctatttcacttcgccaggacccttctgttcagagggtcttagtaaatttgtatgattttgcccatttgaacatttgcttatgatttttgtttacatttgcaagggaagatataaaccccagattataaattattatcatttacatttggagtaaaaaaattatggtggacaaaggaattcaatgtggtagtttcacttgattaaattttgatattgaaatgtgttcaaaaattaaaactggttacaatattatcatctgaaactattaaaatgatgtgactccgtatgaatgtttgaccattgttgtcagtcctagccacagatctttagagaaaggacactcacctccccaagcaaaatctaaggatgggtaagccctggacataaatagtagttttagggactctttatatgtccctgtatatactttaaattatctctagatacttacaaattctggtagaatgtaagtagtcatgttgtattgttcatggaatcatgagaatacaaagtagtatgaccacgttcaatacagatgtaacagtcccacctccctctgagtaatttagaatcccctgtattaatctgtggatgcaattgtgtggctatagagtttgtgatgggctactgtaaaaatgattgacttgtgcttgctagttatagtgttcattaatatctcagtacagtacagacatcatatgtaaattttacttgcataaatttagatatatgacctctacctttcacattaaattatgttttgtaaatataagggatatatttacaaagggatatatttatgtaaatataaggaatataagaaaggtttaaaaacgataattgattcaagtatctgtctctagtatgcaacttgcttatacattttttaagattggagaagtaatgagaatcatgtctttttatgttgttgaagatggtatatataaagatggtatatataaagtggtttttatggattaactcatgtttttgcacaaaaaactttttttatccattgttctactttttgatgcatatgctagaattaaatgaatttattagatatataatatatatttatattacatataactatataggcgggggtgggcatcttggcacttgaggatgtagaagacaatttctgagagttacttctttccttctaccatgtgggtctggggatccaacttttcttcagggataaactcatgtcatcaggcatgcaagtgcctttactcactaagctgactccacaccctgaccatttagatagattctgattctcagatgtcagtagttttgatgatgtttatgagggtctcttgagtagtttagtggtcaatacaacactgttcttgcagagaatgtaaatagtatgtgtcaatggtgctcacgcagagcttgctgaggtgcagttctctctagagttaaaagatctctcacctatagttactagatgctagatgattttgctccttaggtcttgaggagccatatataacaattattacagaaagaatgtgttacattcatccatggatagcatcactaagaatggcacactgatgctttaaagaaaaactttctgcttttttactttgagttttttccctcccctccctttctttccccttccctccctccctttctccctccctccctcgccttcctccttttcttttccttccttctttcctctttcctttcccctctctttccccctctttcccttcctttcattcaataaatcgagtcctatttaataaatagtccaggctgtcctggaacttatgatgtagccataggctggtttcaaacccttactgatactcctgctttaggctccaagtgttgggattacaaacgtgagccaccaccaccaccacccatctgtcctttctccctgttttgatttggcgtttgaataggattgctttatgtagaccctgccctggaacctgttctgtagaccaagttggcctcatacttgattgatagggatcctcctgcctctgcctccaagtatagggattatagagataataatccgtcatgcccaggttttctttcttggtcttgggatctgacacactcacacacacttgctctccctttctctctctctccccatctccccaccccctccatctccacctctctctctctcagcagctaccagtttatgttttgaatataactccacataacttatgatttaatatagttgaatcattattgatcttgggtgaaatgaatgaatataggctgtctacataatcaaaataaagaataattttattagaaaatgtatatgctcataattttgttctgatggctcattcaaggacatgaaaataaagaggtcaacacagcagggagccagtctgctagtcaggagcaaagggcagagtggaacactgctccaagctgtgggccttaggcctctttatcatctgtcacatgggaagatctttgaagttactatcattctttgagcctactttcttcctttcagccttgtataagacagatggtgagatagctctatggctgtggttctcatctaggctgcttttgcttacagggacattcagctacgtttggagatatttttggttgtcataactatgaagactaattttgtcttttgttattgttggacagtgatacatcctacaatccacaagaaagaattattcctctcaaaattttactaatggctaaggtgagaaacctagtattaaagcattattgtcctcccagagagtatagggggtatagaagtatgatgacttttctagtataatatactgatcattcagagaaagtaagagttggaataatattagttactgccttagaatgaagttggtatactagctatgtggtaagtctcccacacattttatgaccttatttacagtccatatctttggatggaagagaattttagggtctaggttaatttcagtgagggtcaatttggtttatgtcagaaactgcttgttccactttggttttgatttgataaacatcatgaccagatacaattgggaggaaagggcttatttggctcacacacttctcagctagcagtctgacactgagagaagtcagggtatgtcctcaaggctggatcccgaaaccagtactgtggaagaaggctccttactagcactcatgctagttcacttatacctcctagatacacccagctaggtattaggtggcctgggccctcccttgtaggcataaatgttatttgcaatctacttttaataagggttcaacctctcctctagcccaccaccctgcagatgtagtggaaaagttattaggatatggggggagtggacctgttcagcaatagttctctgggagcaagcttgatcttttttggcagcagttcagtcccatagcaaacagcaaatatgaatcagcagctgcagaccagtcctctaggcaggcagacaccaggcactggcccctgcaggtagttcaggtagttcaatcctgaaggaaccacaaggctcgccacccgnnnnnnnnnnnnnnnnnnnngccaagtttctctcaatggcagcgttgccacaagttgagctcaacaactctgtataaggggaaccaatacatacctgtcattagtgaagaataatgaggtggagcaaaccaaaccaaggctcagtgtaccttccccactatctatggggtcatattttattccatcatcacaggtattttcatgtgtttgctatgtcaaaacatcctttcacttgtgcctgcttcaggaaaacattctttcacagacatttagaaccctgagtggtttttttttcccccattgaaaatagattttttttcatacaatatattctgattagagttttcctaactcccaacttctcccagaaaattccccaccttaccatccacaccctttatttctctttctcattggaaaacaaataagcattaaaaaacaaaacaaaacaaaacaaaaccagaatagggccaaacaaaaaagcagaaaatatagtcaaagataaggcacaagaaacacatagacatagagacacacaaattcacactcatggaaatcccataaaaacataaaaccagaaagcataacatacaagcaaaaaaagacctgtagcatattttaaaatgcccagagaaagcagacaagacaaaacactccaaaataccactgagtctgttttgtgttggctatctactgctgggcattgaggcctgctcctcaagtgtggtttatatatccagtgaggctatgtggaaaaacctaatttttcctttgcaagtggttatcaatcggggatagcttctcatttaaggaaggggcatgtgtgtatttcctctcagcactgggaccccgcgtgactagggtatgcagggcctgtgcatgttgccacactctctgagttcatatgcacaccagtcctggtgtgtccagagctggccttccttggtgttttccatcaccactgtctcctgacagatttttgcttcctcttctacagagttgggactcttgctttaaatttagtggttgtggtttcttttttgacgtagttggtataatggagaagttgaaatgtggtctttttagggcaaaaatgagtcataagtcagaatatatagatatttatgggaaaaataatataacaaatatagaagaaaggagaataatttgaaagactcgttatttgcaacttttaaggcaaataaattatagctctaaaattgtgttgttgtaaaacataaaaaaccagataattggtatgcttttctgtttgactctcaattttaaaagactctaattgatgtattgtttatattgctcactaaacacagtgtttggatggtagagagagaactgaggattcatgtgataacagctctgagatgtgctgtgctcctaaacaattatagtgtagggctgccaacagtgatgtcaccgtcagtagagaaaggacacttggagacgctccataaccatcatgagaggacagggtagtttgtgcagaattggaagcactgttaacattcctactgtgttcctgtgttctgatgctttaaatgatgtttaaaacatttgattatttataattgcaaattatatttatcatcaggaaaagagaatacagaatacagaagcagttactctttgttacagcagctgtacagtggagctgaaccagagaaaataatgctggtttccttccatactgtgtctgcctgcatatagccacacagtatgacagtgttaagacagacctaactcaatggtcactcttagcactattatatattaacatacattaatatctatcttacttggaaaaggaaaatggctatgtatcgatttgtgtgtgaaatacaattgaacacaaacaaaaccaacagaaatcacaaagttttatcacaggcagaaagacgttaatttaaaagtagtttctgcctgagtggtgtgtcgtctctgccctggggaggctgagccatctccaggcagcctgggttccttgttgtgaccctgccaagatccagtgagccacctcaattttctgaatgtcagcggtcctctctgtccgctgcccacagccagtttgcttagattttcagtttttccacttgggtcattacctttcatactggacttggaacccacataagaagagatggtgttgcttggcagttcttttttggcagtgaggaaactgccatcctttgggcacagggtactaaatttagggcactaggcacattaggccttaaactgactgactttttgtttgtttgttttgttttgacattttctgtcattgtcaagtgcatcagtaactgtaatagtctgtaggtagtaataataacaggtaaatagaatgaggtgcatgcttcctaaatgtggctcttatcaacttatttgactatctgcctcagccctatttagctcaggctccatagttttttgtttgatagtaaactgaaactgaacaacagtagccatttgtgttctccaaagttcttacccattcttatacaaaaatgctggcatgcctttctgtaggagaagcattgtgtctcatttattcattcatgcatacctctgtgtgtgtgtgtctgtgtttgttgtgtactgaggggctttgggtgtcttcctctaccactttccatctattgttttgtggcagggctttttgctgagcctgggctcacacttgctcggctaggcttgaaacagtaagcctcagtggcctgcctttttatctcttatttccttggagttggtgctccaggacatatgggatgcctggcttgttatgtgggtgctgggagctgaacaccactactcaggattgtgcagcaagtactctatctgctgagccattcctttaaccctaaagcactccatttcttttacccatagatgtctgtggataaaatgtctgtgagggaaagtgaacatgtgaaatatttgtctccatctagagtgacacagacttaaaaaacagacattatttttaatttcattttctcgaagtagaccaatgaaactgatacttctcattttctgggctttgtgacttttactgtgatagttggtatttttatgtatatgaccatcattgtcttttgtatatcacagctgaaacttaggtctgtggactcagagttccttggttataatatttcctagctctgtgatccttgggtaagttactaataacctgctagtgccatattttatcagtgcctttttggggagaacagtgcaccagactttccttttaagcatccaattttcttgaaaaattatcatctaaaatttaagaatgctatttacaaacaaatgaataaaaactggccaactttcccctgcattcctacttgaatactgtctgtcttagttagggttttactgctgtgaacagataccatgaccaaggcaagtcttataaaaacaacatttaattggggttggcttacaggttcagaggttcagtccattatcatcaaggcgggagcatggcagtatccaggcaggcatggtgcaggcagagctgagagttctacatcttcatccaaaggctgctagtggaagactgacttacaggcaactatggtgagggtcttaagccacagtgacatacctactccaaccaggtcacacctattctaacaaggccacacctctaaatggtgccactccctggcccaagaatataaaaaccatcacactgtccataaataattgctattaatagtagcaatacttgttgaaaataatttgaataaagtgtcctggtagctctaccattcagtttttttcctgctactgaactatctgcttgaaagctgacacttgtcaaagaactggtgacatctgtctctgagccttggcatagtctatgctaatcttgttttgtgtaaaactttaactaacatgaatagaactacacttttgttggttaagttaaaaaaataactagttaaacagtactttaaaaaggactctgtagactttgtatagtgtcagggagataagctgcttctaaactctcattctgaacagagcagcagtttctagtgtgacatttagagggttggggatagaatgcttatatatttctttaagaataaggtagtatatttgtatcagctatttctctattataatttcttctccaaactttcattttttatgaattgatcccctttattgatccaaaatattctatttcacataaaaataacttgtttttttatttcattgatccataaaaatttaataaaaggtccagttagcattatatgttggtttgagtctccattcagcaggagaaatagaaacataccatatatacaagtggaaaaccccatagttccacagacttgtgctatcttttgctcaaggtattggaagcatttggttagtttgctggctcattaaatggaggttaggacagtgttttctctggctggagactttaagttcccatgcttcagagaatgctttttcagacctcactttatcacacatacccagtcctaattgtacaaaccttcttcatgttatatcaatacagtaatgatttctgttttttctgaggctgtggtctcctagggattagtgagagcccctttttgtttttccgtttcttcctttgcatcggccttatggaacctcaaactgtatttcagtgtactcactgttattctcatcactgtgatgctgatacccagaagaacagcttagggagggaggatctgtttcactttgcttctttagtccatcagggtgaggaaggcatgatggggcagagcagttcacatcacatggtggccagaaagcagaaaggaaagaaaattagggataggataggatttctccaaggacatgtctgtcaccagtgatctaccttctccagctatatcctctgtggcaaagcttctagagtctgtccatagagtctgtcatgaactggttaccagagagcttttggctgcatttcatgttcatactagaaaactctacatgtgtcccttccaggcttatggcatctcgcaatgaaaaatgcatttggttcagtcttaacaattccagcgtactttgacagtcaagacccaacgtctcctgtgagattcaaggcagagtcctagtgctaaatccttgtaaaaataaaaaagcaagttgcagacttagtagtagacaaagcagcagagggtaaacattttcattccaaaagagaagaataggagaatctgaggaagggttagactaaagcaagacccacacccagcaagacaactcttactgtgtaacactgtaattgccctgtgtctggcagccagagaacacagtaacattgaatgagctgcagttgtcaagggctgcccaccccagtgatctttctgtttgcagcccacttgtcttggacatatagctttccttgacaggtgttctacttcttggcatcactgacatctcagggctcaaggtcttctatatgactttgactttaccctcttagtttcatacactcattcattcagactttgatttccccatctttgccatctcctaggtttgttcgtgctctctctctctctctctctctctctctctctctctcctccctccctccctctctcccttcctcccccaccccatctgtgtgtgtgtgtgtgtgtgtgtacaggcttgcttgcttgtgtaggtattttgcctgaatatgtgtttgtgtaccctacatgtgcctggtacacaaggaggctagaagatggtgtcagatcccctggaactagagttacagatggttgtgagctaccgtgtgagtgctggaaatcaagcctagttctcttcatttctgagccatctctccaatccctcccttgaaatcttggaagtctccacgaccctataactcatatatttttcatgcgtggaaaaccagtacgatggggatggcaacacaattaactgccagtaatctagctgggtcccctggaccctgggggaaatgctgagtgactaggtgactgggctcaagaaagtgaattatgaaataattccctagatattcttgtgtgagcaaagcactctagagctatttgcttctcaggggaatgtctttcagactagtttaatccttcataacctagaacctaaggtgggtaatttccgagataacttcataacctttccttttgtcccatgcaaagttcttatctttattatttgaagcaggatctaactatatgacctagacaataatagcttcagtgagtattttagagtgcaggtgatttttggttgttgttttgttttgttttgtttttggctcatgatgggattgaattccgagcctttggcttattttttaatgccactaatctcttcagaagccatatttttacagtcccaactttacccagacttttctcactaaactacaagtttccaagtcttttagatttgctttttgcacccaattctcattgtaaacctagctgtaagtagctatcagtggccatgtcacaagtggaatgcttcagtgacttaacattccctcagctagattaatagtggtttcccacaagttttcatggcataatgtgaacagctctttccctgagcatacatactcaacttctaggccagttccctgcctacattccacagaatcattcattaaaagctctactgttcagcagcctaggctctgtggcctgcttcttcaaattcttcctacaaaccagttctaaaggctgaatggcatctctctcctccaaagccctataatgaccctagttcctgctactggttttcttttattgtcacagtggtccaatgccccacagaaccatcttagaagggacaaaagatttgttttagctcacagatttaaaagttttatttttcatgtcagagagcccagagagtgtggcagagagcacggtgctgtggagccagaagacagagggctagggagatactagggagatcaaggcagccacaagatcctactttgtcaagctagcttccatctctccatctctagaacatctccaagtagtgccattaactggagaccaaatcaatacatatttgtcacagagatctagtggagaaacttctggttcaaagtactccagaagaactgtcttatactgcccaggtactatgtagtttgggtacacttgtatttttctggataagccaagtaattggaatacaagaagccaagacagtaattcaggaagtgggatagatgacttgtcagggacaaccaggacaaggcaggacctgcagtgcatctctagtcccaaagtaaggatcaaggcaagtctaaaataaagtcagtgtcctcattcccaggttatagtggaattgtgctctctggcaaaaggttaaagcctttgaatgctcattataacagcatcatttctgtcaagtgttcctttaaaacacgtatagtgaaagctttttattttttaaaataaaaacaatttaggaccagagagatggctcagggaggaaagataccgctgtcaagctgatggacctgagtttgatccccagaaagctcatatggtgaaaagagaggattgactccatagatattctcctctgacctccatacgtgctcacgtgtacacaaaagccaaatgtaaaatcttagcatcagttctttcctaggagtgtcatcataaattatagttaaaacatctctccctccctctctccctccctccctccctccctttccattttattaaagatagggtcttactatgtagtcttggctgacctggaatttctctgcctcccaagtgagattaaagacatgccatctaggctacttgttccgttttacatatttaaaggcacaaatgcttgctaaggtatggtttttttttttttttttttttttttccctagtgaatggaaaatctaggactgtatttattttaagagaatatccctctcccttttttgtttgttttgagattagattgttcacttttttttttaaatgtagctagccttatttatctatgtagcatataggcaagtagaactattggaaaatcttatacactgccactattatctacctgtctcatttgcctttagttattgtatgtgtttataaactgctccaatcttcagaaaaaactatagtccattaaaattatttgaaaatttgaaatgtcacatattattctttccccttgctagcgtgtgtaattgtatgcagagtttcttatatcttatttatatatgtatttttatctatttgtgtgatattgttttttgacctccattattttctgtgatgggaaccagttctaccagacccgtctatcttggtggaagcaaacaatggaagagtgagaaacaaaccagctttacctgctagagaggtagcttgttttattcccagctctggagatgttgatattgtctcagagaaacccataaagctacattaaacaaaggcacgtcaaggttttgggtcaaggcagagagccagacagagagagccacactgttaccatgtcaaatgagcccctctggggagtgggggaacacggtgaataatgaagaaagactggtgtctgctatgtagtagttttactcttaaatttgaatgaaaaaaaaagatgactttttgttgtttgcatggaaataaacatttccagtaaatgtttccatgtggttagagggtattgttgtcctgagaattgtagaattatgtcataaaagaaaaatcatagataactttgtgtttatatgtgtagctgtatcaatctcagggcatcaagttggttttgagggaaagtaaagacaatatttttgtttttgtagaaccaaatatatcctggattttcaaaataacttattagaatttttagtctgtttttcaaaggtttttggagaggtagggtacctaggagaacgttggtcttactgttctctgatcgtgtgggatggtgtgggtaggtgcaggtggaaagcccagcatgagaaggtggggacagtccccctctgtccttcactagggatttaccagcacctgaccatctacattctcaagtcatagtctgtaggtcccaaagcttttgtttcaagcacctgttttgtctggctttgtttctttatcctacagattcctgatagagtcttttaattgtgactaataaaggcaagtggtttaaaactacacgtgaaaggccagttttatatccatctccattagtagacaaatgcgcacctagatataagaaaaatgagctcacaaacctttgttactttccatagcaacaaattcactgagctccatacgttgtttattatggttacaatcttgtttgaaagtatgtgtttaccagttaattttaaaagaaaaatctctatgaggctggtgagttcatgaattaaataaaatacgatgaaaccgtgtccggggatgataggaaatgcagagtgcgtaaagagggccactaccttccaccaactgtcagagaaattttaaaggcaagactttataaatgtaaaggtagatatatacatatattatttgttcactgtgatggctaatctgtcaacttgataggatctagaatttgagacaaacctggctgggctcgtctttagattacattgaggagggaagacccaccctaaatattgacaagtatgtttccacaggctggggtcttggctgagccgcaagcttcacctccctctgcttccttcctggcagtggatgcaatgtgcccagatgcctttccccactaccacgccaccctactgtgatgtctgtttcttgtgagccaaggtaaatcccttcttcctaggcggcttttgtcaggcattttgttgcaacagtgagaaaactaatacatatggtgtttggtttcaagagtcttatcactctcaagaataactttaatccaagatgctaagcagaagaggtttctaagtaatccaaaaatgggagaagtagaaatcatgatatggacgacagccagcctgactccagtcatttccatgagcctttttatgaatacaatttactgtattctcgtgtgctcttacaatgatgatccaaggcgattaaaatatgtcctgccttatcacaaagcaaataaattatttgctttgtgataaggcaggacaagttatgtgacattcccaagtattgaaataagacttattgcaagaagaattaagtcttggaaatctataacgctccataatgtgggtcagtacatgacccacaaccctcagaaagccattatattatgttttaatagcttcaaggattgaaaatgaattagagaacatcccagcctttaaagtgaattgaatatagctgcagtaactcctcgtagggaaggaggctagagacagaaaaaggagcaaggtggctattgctgtagctgagttggacatgggggaccaaggtcaagaacctgggtatgggccctttaagagtggaagggttgcatgcagacttacaggaaaaaatgtgcaagaagtggttaggtggctgtatgtgacaaagagggctgagtggaagtgattgagactttgcagtgttttggtctgggtacatgtgcattactactgcagaagtgggacactgggttttgcaaggaggaaaactggctttgttctagagtgctgagttcagttggcaagagacttggcaggagcttggatgtaccagcctggatctctgaatggttcttttcagcagatccccaggcaagcaaagacaggcatactttcattgttgccctggtaaatgcttaataattattgcttggtttgtatgtcttttgaattttgtgggatgactggatttgcttagaaataaactttgttcagatacgtagttttcacttacaagaagtgaggagacatgcccatacacttccagtgggctagcccatgatccttgtgcctgcatggtctccggaaatgtcacaccatttcactgtcctgctgccctgtacattgctcacttccatgtaattttaaaagtacaggcacattagtaaagtttccatcatgtttgtcttgtgcttctgcttttcttccactgagatgacttgctcatggttgacttgaactactaaggaatacacagtttctccactctcaatgtgagagcccttttgctgtgtctttgaatgttttgatacttccttgatctttacacaagtattccaagtttattcgctgcgcattgtaggatgctgttgggacagtaagatgttacagctgcacttccttgagtcagtttctgatagcagcagggaactttggaggtgactaaggtagttagtcttcataataaatcaaagtttattgaaatcactgcttacacagcagagactgttgctggaagcctaaaagctgatagactaggacgtagccctgagggatcagtgtgggggatctggatcggtaccatttttgttttctgtctctaattactactctgctaataattgagcatactatttattaattagtgagtgagggatttttctctatctgaataaagatatcataaaagtaaattttcttttttttcagcctggatatagtcaacttgaattcctataaccaaggagttgtttatacaaatctaagcatatgtttttctaatcaggaatgttgactcatagacctctttcagcgatcccttccctgagtatgctgcagaaaaagcagcggagctgcaggggagagtacatactgactaagctttatttctagagctggagaggtgccagtctttcaaagttctcaagcctaaggcttctggaaaagaatattttctcaggcatgccttattcaatttctaatgagctgttgttgttctgaagtaaaactgtaatttgctgtcacatttgtgctctgtggacataactgtgaagcagttggttttgttgctgatgtccttttaggataaatgatttgctcagaagtttgagatggtcccaactttttctggggaaaatattctgactttgctcctcttttctcattaaagtatcactattgtactttgctttttttctcccttttaccttctaatttctcaaaatgccttattccctaaacacaatataaagaaaagccactgataaacagggtttaaattactgattcttttttactgtcaggccgagtttgcattgaaatttttcaacaatttaattccattgaaaaattaacaaacaaacacaacttcccgtgtgtgtgtgtgtgtgtgtgtgtgtgtgtgtgtgtgtgtgagagagagagagagagagagagagagagagagagagagagagagagaagcagcagcagtagcagcagtagtagcagcaatagtagcagtagcaggaataacagcagtagcaacagtagtagcagtggcagtagcaatagcagtggcagcagtagcagtagcagtagcagtcccagtagtagcagtaggagtagtagaagcagcagcaatagcagcagcagcagcagcagcaatagtagcaatagcagcagcagcaatagtagcagtagcagcagtagcagtagtaagtagtattaggtcagtcagaggtaacttttaggaaatggttttctcctttcatagtgtgggttttgggactgatctcaattctttaggcttgacatcaagcaacctttcctgtggaggcatcttactggccaaaaggttttgttgttgttgttgctttgtttttgttgttgttgtttttttccccttttctttttctattttttgaaaataggggcgatccttatatctgaagctttgtagacagtgcacaaggaaatgccctgctgttaagactgtagttctgagactaatgatgacagcaaactattagaaaatatgtataagccttcagagtgagtgtagttgtacaagtactctcttcatttgtgtactaaggctgagagatatcttggtccagctccagctgatgactgcattggaagttaggtctttaccctctgctcctgactctccttcatgctagcttgcctacttgccagtttgaatcactgcattcaaaatgagctcaatggaacttggtctaatgaatatttagtgttgggccattcttgacatgggatgggccgtctcctgtagtgtgctctttactttttttgtagtaatcacaacctacatttgcttgactatagagtttgatatatattatagcactaatttaattagcagttgttgaatgctcactatatttcagaaacactgctaagtacagatgcataatctaacatctctattgccgtcagtctgacatcagaggcgctggattcaagctcaagtcttccagctccaaatctgtgctcttaactctatgtttgagctgctgtggttagactacttgattgttttttaagccgggagcttattgacctaagatttgagtctaatcctatactatcaaatctacgtcatctaagtttgctttctttctgttactgggccttctttgttgttgctgtgtactttactagaaactgggttaaataaattaatccatcttttctgtgttggggaaatgtggctctcttcaagattgtgatgtctttaaaaactcaagatgagggaataactgggatcagcaggacacaggcatgcaggaaatctgccatactcgtggcacaggttccttctggtctgggccagtgcactgagtagattttgggtacaagctctgcagccagctctacaactcccagtggaagctccactcccaggtgctctaatatgcccaggatcataggatcagaggtgaggaggacataacatctgtcccaacactgggagtaactgggaccagtgggactcaggcatttaggaactttgccagaccagtggcacaagttccttctggtctgtccaggccagtgtcctgagcagaccttgggcgcaaactcctagccagtctcaaacacctagaggaagcttcattcccaggctctctaacacgcccaggatcctaggatcccaggatgccaggagcttggttacaccaggatctcagggtcccagaggcagcttgactccgaggagctctgacacatccaggatctcaggatcacaggaccccagaatcacaggatcactgagacagcttgactctgaggagttctgacacaaccaggaagggcaagctctagttagatatagccagggcaggtagcactagagattacgagatggcgggaggcaagcataagaacagaagcaacagaaaccaaggttacttggcattatcagagcccatttctcccaccatagcaagccctgcatacaccattacaccagaaaagcaagattcagatctaaaattacttcttatgatgatgatagaggaatttaaggaggccataaataactccctaaagaagtacaggagaacacagataaacagctagaagcccttaaagaggaaacacaaaaatcccttaaagaattacaggaaaacacaatcaaacaggcgaaggaaatgaacaaaccatccaggatctaaaaatggaaatagaaacaataaaaaaatcacaacaggagacaaccctggagttagaaaacctaggaaagagatcaggagtcatagatgtgagcatcagcaacagaatacaagagatagatgagagaatctcaggggcagaaagaatatttcatagaaaacattgacacaacagtcaaagaaaatgcagaaagcaaaaaactcctaacccaaatcatccaggaaatgcaggacacaatgagaagaccaaacctaaggataataggtatagaagagtgggaagattcccaacttaaagggccagtagaaatcatcaacaaaattatagaagaaaacttgccaaacctaaagaaagaaatgcccatgaacatacaagaagcctgcagaactccaaatagactggaccagaaaagaaattcctcccgacacatactaatcaaaacaccaaatgcactatacaaagaaagaattttaaaagcagtaagggaaaaaggttacgtaacatataaaggcaggcctatcagaattacaccagacttctcaccagagactatgaaagccataagatcctggacagatgttatacagatcccaagagaacacaaatgccaacccaggctactatacccagcaaaactctcaatcaccatagaaagagaaaccaagatattccatgacacaaccaaatttacgcaatttctttccacaaatccaaccctacaaaggataatagatggaaaactccaacacaaggcaggaaactacccactagaaaaagcaagaaaataatcttttaacaaaacccacacaaacataattccacatctaacaacaaaaataacaggacgtaacaatcacttttccttaatatctcttaatataaaaattaatattatcaacataacctagtggattgaaattcaaaaatatgagaaattagaaatttgttgtctgtcatccagtggtctctctaatttggtaattggagaaataggtccaatattgtacaatccatatacactttctgcttctttgtacatgacattgtcttgctgtgtaccacataatggtcttgaaatcatgcttctcctatctcagcctattaggattgtttatttgatgtttttacactatgctatggttttcaaaatagcttacatatttcaaaattatttatccagccaaaagaaacatggacaattaatttgggagatggcttgtaagagaacaacaaagagtgagactgaatcttttgtttgatatttataattattgtatcaattttgaagaagaggaccttataagttactctttttctgagatgaatgcttttcaaaatcataacagccaatgaacccgaatcttaccctcacctaatgtctgtgctaccctccaagcagaaccattgttcattaaaacagttgatgaactacttcatggatagaccatcttaatacacacaccatttcttcttttcttttcttttttcttttttggttttttgagacagggtttctctgtatagccctggctgtcctggaactcactttgtagaccaagctgtcctcgaactcagaaatccgcgtgcctctgcctcacgagtgctcggattaaaggtgtgcaccaccaccgcccagctcacacaccatttcttaaatgaatataacctattccctgtgggctgagaatgatgacaatcactcaagtcaaatatctttgaccatagcaggaaatatgtgtccaaataattgtgcctacaattcattccttggcacaacagaactgtcagctcttagcttagctactatagaggtgaaatcctttgatgatgggagggacattgaagtacagccttattaccatgaattccagtgtctaaaaattgttcttattttcggtttgtaccacagtaagagccaagattttaaagctatactaaaaacaaaacaaacaaagaaaaaaaacccaaaagactatctatttatgttcatttaataacatgcccaccatttttatgattggtataaaatattgtgttgagtataataaaaatttagttcaattgaaaaaaggataagaaaatatataaatagaaaagagagaggagaggtggctgcctgggtggcctctgaatgctggagcaggtgagggagccatcttgtgtcctgggttcctggagaccagtctgcaggtgagcttacagactgcagaggtaacacatcttctgggacaggccctgttttgggccttcatcttcagccaggaggcaggtctgaacaccaaaactttgtgcaccttccctgcaagaggagagcttgcctgcagagagtactctgaccactgagactcaggagagagctggactcccaggactactgaaagaggctaacagaatcacaggaggaacaagttccagccagagacaactataagaactaatgccagagattaccagatggtgaaaggcaaatgtatgaatcttaataacagaaaccaagaccactcaccattatcagaatgaagcactcccaccttagccagtcctggataccccaacacacctgaaaagcaaaattcggatctaaaatcatatctcatgatgctggtagaggactctaagaagggcattaataactcccttaaagaagtacaggagatcactgctaaacaggtacaagtccttaaagaggaaacacaaaaatcccttaaagaattacaggaaaatacaaccaagtgggcaatggaattgaacaaaaccatccaagacctagaaaggaaagtagaaacaataaagaaagcccaaagtgagacaactctggagatagaaaccctaggaaagaaatcaggaaccatagatgcgagatcagcaacgaatacaagagatgcaaaagagaatctcaggtgcaaaagattccatagagaacatggacacaacaatcaaacaaaatgcaaaatgcaaaaagatcctaactcaaaacatccaggaaatccaggacacaatgagaagaccaaacttaaggataataggagtagatgagaatgaagattttcaacttaaagggccagccaatatcttcaacaaaattataaaagaaaacttcccaaacctaaacaaagagaggcccatggacatacaagaagtctacagaactcgaaatagactgtaccagaaaagaaattcctctctacacataataatcagaacaacaaatgcactaaataaagacagaatattaaaagcagtaagggaaaaaggtcaagtaacatataaagaaaggtagtcctattagaattacagcagacttctcaaaaggactatgaaagccagaagatcctggacagatgttatatagatcctaagagaacacaaatgccaacccaggctactatacccagcaaaactctcaattaccatagatggagaaaccaaagtattccatgataaaaccatattcacacaatatctttccacgaatctagcccttcaaagggtaataaagggaaaacatcaaaacaaggacggaaactacaccctagaaaaagtaagaaagtaatccttcaacaaacctgaaagaagacagctgcaagaacagaatcccaactttaacaacaaaaataacaggaagcaacaattacttttctttaatttctcttaatatcaatggactcaattccccaataaaaagaaatagactaatagactggctacaaatacaggacccagcattttgctgtttacagaaaacccatctcagggaaaaagacagacactacctcagagtgaaaggctggaaaacaattttccaagcaaatggtgtgaagaaacaagctggagtagctattctaatatcgaataaaattgacttccaatccaaagttatcaaaaaacacaaggaggggcacttcatactcatcaaaggtaaaatctaccaagataaactcccaattctgaatatctatgctccaaatacaagggcacccacattcattaaagaaactttaataaagcttaaagtacacattccacctcacagaataatagtggaagacttcaacaccccactctcaccaatggacatatcctggaaacagaaacggaacagagacacatggacactaacagaagttataaaacaaatagatttcatagatatctacagaacattttaacccagaacaaaaggatatacctacttctcagcacctcatggtacctcctccaaaattgaccatataatccatcacaaaacttgccgccacagatacaaaaatattgaaattatcccatgcatcttatcaggtcaccacagactaaggctgatcttcaacaaaagtataaataatagaaagccaacactcacatagaaactgaacaacactctactcaatgataccttggtcaaggatgaaataaagaaaggaattaaagactttttagagttgaatgaaaatgaagccacaacatatacaaacttatgtgacacaatgaaagtggtcctaagaggaaaactcatagccctgagtgtctccaaaaacaaactagagagagaatacactagcagtctgacagcacacctagaagctctagaaccaaaggaagcaaattcacccaagaggagtagacgtcagaaagtaatcaaactcagggctgaaatcaaccaagtggaaacaaaaagaagtattcaaagaatcaaccaaaccaggagctggttctttgagaaaatcaacaagatagataaaccctttgccagattaacttgagggcacagggacagtatcctaattaacaaaatcagaaatgaaaaaggagacataacaacagaacctgaggaaatccaaaactccatcagatgttactacaaatggctatactcaacaaaactgaaaaaactggatgaaatggacaagttcctagacagatagcaggtaccaaagttaaatcaggatcagattaacaatctaaacagtcccatttcccctaaagaaatagaagcagtcatcaatagtcttccaaccaaaaaaagcccaggaccagacgggtttagtgcagagttctatcagaccttcaaagaagacctaattccaactctcctcaaactattccacaaaatagaaacagaaggtactctacctaattaattctatgatgccacaattactctgatacataaaccacacaaagatccaacaaagaaagagaacttcaaaccaatttcccttatgaatattaatgcaaaaatactcaataaaatccttacaaaccgaatccaaaacacatcaaaatgatcatccatcatgaccaagtaggcttcatcccagggatgcagggatggtttaacatatggaaatccatcaacgtaacccagtatataaacaaatttaaagacaaaaaccacatgatcaccttattagatgctgagaaagcatttgacaaaattcagtacctctttatgattaaagtcatggaaagatcaggaattcaaggcccatatctaaacataataaaggcaatatacagcaaagcagtagccaacatcaaactaaatggagagaaactcgaagcaatcccactaaaatcagggactagacaagactgcccactttctctttatctattcaatatggtacttgaagtcctagccagagcaattcgacaagaaaaggagatcaaggggatacaaattggaaaggatgaagtcaaaatatgactatttgcagatgatatggtagtatatataagtgactctaaaaattctaccagagaactcctaaacctgataaagagcttcagtgcagtagctggatataaaattaactcaaaaaaatcaatggcctttctctacacaaaggataaacgggctgagaaagaaattagggaaacaacacccttcacaatagtcacaaataatataaaatacatcggtgtaactctaagtaaggaagtgaaatgaaagatctgtatgataagaactccaagtctgtgaagaaaataattgaagaagatctcagaagatggaaagctctcccatgctcatggattggtaggattaatatggtcaaaatggctatcctgctgaaagcaatccacagattcaatgcaatccccatcaaaattccaactcaattcttcactgaattagaaagggcaatttgcaaattcacctggaataacaaaaaacctaggatagcaaaaactcttctcaatgataaaataacctctggttgaatcaccatgcctgacttcaagctgtactacagagcaattgtgataaaaactgcatggctctggtacagggacagacaggtagatcaatggaatagaattgaagatccaaaaatgaatccatacacctatggtcactcgatctttgacaagggtgctaaaaccatccagtggaaaaaagacagcattttcaacaaatggtgctggcacaattggcggttatcatgtagaagaatgcgaattgatccattcttatctccttgtacaaagctcaagtctaagtggatcaaagaactccccataaaaccagagacattgaaatttatagaggagaaagtaggaaaaagcctcgaagatatgggcacaggggaaaaattcctaaagagaaagaacaacaattgtttgtactttaagatcaacaattgacaaatggagcaaggcggtggtggcgcacgcctttaatcccagcagaggcaggcgggtttctgagtttgaggccagcctggtctacaaagtgagttccaggatagtcagtgctacacagagaacccctgtctcgaaaaaacaaaacaaaaccaacccccccaaaataaaacaaataaacaaacaaaaaagaatcaacaaatgggacctcataaaattgcaaagcttctgtaaggcaaaagacactgtcaataagacaaaaaggccaccaacagattgggaaaggatttttaccaatcctaaatctgataggagactaacatccaatatatacaaagagctcaagatgctggacttcagaaattcaagtaaccctattaaaaatggtgtacagagctaaacaaagaattcgcaaaggaggaatacggaagggttgaaaagaacctgaaaaaagttcaacatccttaaccatcagggaaatgcaaatcaaaacaaccctgagattccacctcacaccagtcagaatggctaagatcaaaaattcaggtgacagcagatgctggcaaggatgtggagaaagaggaacactcctccattgctggtgggattgcaagcttgtacaaccactctggaagtcagtctggtggttcctcagaaaattggacttagtactaccggaggatcccgcaattcctctcctgggcatatatccagaagatgtcccatcgggtgagaaggacacatgctccactatgttcatagcagccttatttataatagccagaagctggaaagaacccagatgcccctcaacagaggaatggatacaaaaaatgtggtacatttacacaatggagtactactcagctattaaaaagaatgaatttatgaaattcctaggcaaatggttggacctggaggatatcatcctgagtgaggtaaccggatcacaaaagaagtcacttgatatgcactcactgataagtggatattagcccagaaacttagagtattcagatataatctgaaaaacacaagaaaatcaagaagaacgaagaccaacgtgtggatacttcattcctccttagaatagggaacaaaatacctatggaaggagttacagagacaaagattggagctaagatgaaaggatggaccatccagagactaccccacccggggatctatcccataatcagccaccaaacgcagacacttttgcatattccagcaggattttgctgaaatgaccctggtatagctgactcctgtgaggctatgccagtgcttaccaaatacagaagtggatgctcagagtcatctattggatggaacacagggtccccaatgggaggagctagagaaattacccaaggagctcaaggggtctgcaaccctataggtggagcaacaatatgaactaaccagtacccccagagcttatgtctctagctgcatatgttgtagaagatggcctagttggccatcattggtaagagaggccccttagtcttgcaaattttatatgccccagtacaggggaatgccagttccaagaagtgggagtgggtgggtatgggggcagggcggggggagggtacagagaactttcagggtagcatttaaaatgtaaagaaaatatctaattaaaaaaacaaataaaaaagaaactatactgaaacctaatactatgtacattaatttaaaatttaaaatacataccaaagttttttttttaaaagactatggtttcatggtgaattttattatatattcactgcagtgaattcactgaaacttgcactaaatacttaacattgccaaggttattcttgtcttatttgacctggagtttgaacccagaatctcatgcatgaaagatgagcactctatcactgaactacattccttcactctttttatgaattatatatcattttgacaaacttcaagagaatggtatttttaatctgaacttctttgaaacatacttgctgtgttgttactctgtgcattaaaacgtgtcacatctgtgtccctgatgttttacttgaaaaaaaaaaaccctcaaggtgaaatttcatgtagttttatacacatatgtacacttgtgcatgtgcacaagcgcacagacacatgcagtgcacccccagtatatttgacgtgctttcttctcttcaggaatggcaagacaagttctcatagagtgctttatgagttagtgtgctaagctatgattttgaagattgagaaaatgagctatcacatagattttcctgagaactttttactgtttcagattttgattaacaagttaactaggtgttttttgttgttgtttaaaattatttatgttgtgtttgtaaatttgttattgaaaaaatggagaaaatgagctggagagatgtctcagctgtaaagagcactttttgctctttcagaggccctggtttcagttcccagcatctacatgaacgttcattcataaaatgagtaaatctgaaaacaaatcaaaaagcaaaaaaaaaagaagagtcttgtgataatttctcttataacttaaatgttcaaaggacactgtagaattgatgcttacaatactatacagaagtgacttttaatgagaaacaacattgtattttaatttatattttacactttctatttccctgctctccccatccacactcttatcgttccacatcccatacctcctccccaccccgctttctccacgtggatttccccaccccaaaccccacctgacctgtaaattccctgggcctccagtctcttgagggttaggtgcatcatctctgaatgaacacagaccaagaagacctctactgtatgtgtgttggaggcctcacatcagctggtgtatgctgtctgtttggtgatccagtgtttgagagatctcaggggtccagattaattgagactgctggtcctcctacagggttgccctttttctcagcttctttcagttttccttattcaataataggggtcagctgcttttgtccattggttgggtgcaaatatctgcatctgactcttccagctgcttgtagggtcttttgggggggcagtcatgctaggtcccttttttgtgagcactccatagcctcagaaatagtgtcaggccttcggatctccccttgagctggatcccactttggccctgtcactggacctgtttttcctcaggcttctctccatttctatccctgtaattctttcagacaggaaatattatgagtcagagatgttactgtgggatggcaacctcatccctcacttgatgtcttgtcttcctgctggaggtaggctctacaagttccctctccccactgttgcgcttttcatctaagatccatccctttgagtcctgagaatctctcacctcccaggtctctggtgcattctgggggttaccccccacctcttattttctgaggttgcttgttcccatttttttctgctggcccttagggtttcagtcttttccctcatccaataccagattgaagttcccctcttccccctgcccccatccactttccttcccagttccctccctccctctccacttgtgactgctttattctctctcccaagtgggaatgaggagttctcacttgggcacttcagcttgttgacctttttgagttctgtggctgtattttgggtattctgtacttttttttttgtttgtttttttttttttttggctaatatccatttattagtgagtacataccatgtacatccttttgtatgagttatctcactcaggatgatattttctagttccatccatttgcctgcaagattcaggatgtcctcattcttagtagctgagtagtattccattgtgtaaatgaaccacattctcatttggttccatttttctgtcatgggacatctaggttgtttccagcatctggctatcacaaataaggctgctatgaacatagtggaacacgtgtccctgtggcatggtggggcatcttttgtgtatattcccaagagtggtatagagtgtggttttatttttgggtcttcaattctatgccattgatcaatgtgtctgtctctgtaccaattccatgcagtttttttgtttgtttgtttgtttgtttgtttgtttaatcactattgctctgtagtaaagcttgaggtcagggattgtgattcccccagctgataaacagcattttttacttacaagtaaattaatgattaggtagagagatggtagggatctaacttcactctcaaaggaacagaataaagagtaatgtatcattcttgctcttataccgtgcagcatctagattctttattatcaagggggttcactgattttgaagacttttctgagagtactttagaacaatagaaaacaaaattttatttaaagggctagatagtaatattttatgtattgtatgtaattcacttaggcatcctcctgtcagcctttgagtaggacctgctctggctgacaaggtgttgtcaacttgacacaagtcatggccatctggacatgattgagaaaatgatttgagatgcctctatcagattggcctatggacgtgacagtagggaattttcgtgattagtggttgatgtaggtgggcatagctcaatgtgtatgacaccatacttgggcatatatgtggttttagtatgtgtgagaaagcaggatgagcaagctaggtagagcaagccagtaagcatgatttttctatgataatggctttagttcctgcttctagtttcctgtcttgacttccttgctgctttggcttactctgatgatgaactgcaaggtgtaactaaataaatcctttccaccccatgttgcttttggttggggtattttatcacatccatagaaaataataatctactttttactttctaattttgttttataatctaatcctttatttcccaattatggattattgattcattgttgtagtgaaggtttctcactacttctgttgcaattttcatctacattgttctctaaaaacactgttgttgagataggtgtgctccacaatttcttatatgtaagctgtactaattgtttcttgatttcttgtttgatgttgactccttgtcatccatacttaaaaattggttttgagcttcccatataccaaacactctctgagcccacactttaatagatcatagctcatgactgataccttgacatctaacattgacataactggatttatggaagtacagtattaaatacacagtttaaattgtaaaacctacaggtattactcagtgactgccataacactgtgtattggtcattgtgctttaaagaaaacactggcttgtgtggtgttctccacacactatgtaggaaggagctgtttacagttttgtagtgggagctaagaggagtgactactaggtgcaggggcacatgtaggccatctgacttgagaagacagtttaaaaacactgttccgttgcttccctaatgagttgatagagtaaagaagggctttgaagcctggaatcctccaagcatagctttagcctttattcttttccttgccaaggttccaggacctttgtattttgttgttttgccagatatttgtgaacttggctgaacttttagacagaagtatttgaatgtttgaagtagggaagagttgaaggttattagaataagaaatgttcagtttttttctcttggaactcagtgaggtaggtgtctttcagtagactgccagggactctaatccataatcaaagacaagggaaagcatttccacatgattcttcattgtggggattggttaaatacacaaacaaaatactgttttggtcagccatctgctggaagcctgaaaggaattttgtaaattttcagttgttttagaaaaattgtttttagtatcttgtttatgcttgttaattgcttgataagaaaaattctaccttactcaggatgatattttttagttccatctatttgcctgcaaaattcatgatgtcctcgtttttaaatagctgagtagtattccattgtataaatgaaccacatttcctgtatctaccgttcctttgtaggacatctgggttgtttctggctattacaaataaggttactatgaacatggtgaagcattattcctgtggtatggtggagcgtcttttgggtatagttccagaagtgataccgctgggtcttcaggtagagctatctccaatgttctgaggaaccgccagattgatatccctggttgtaccaatgttcaatcccaccagcagtggacctctttctccacatccttgccagcctgtactgttgggcgagtttttgatcttagccattccgattgttgtaatgttgtaatgtttggaatctcagggtcattttgatttgcatttccctggtgattaaggatgttgaacatttctttaagtgcttctcagccatttgagattcctctgctaagaattctctgtttagctttataccccatttttaaatagggttatttggctttttgaagtctaacttcttgagttctttgtatcttttggatattagtcctctattggatgtagggttcgtgaagatctttccccaatctgtaggttgctgttttgtcttattgacagtgtattttgttttacagaagctttttagtttcatgaggttccatttgtcaattattgatcttagagcctgagccattggtattttgttcaggaaaatttcccctgtatcaatgtgttcaaggctatttcccactttctcttctattagattcagtgtatctggttttatgttcaggtccttgatccacttggacttgagctttgtacaaagagataaatatggatcaatttgcattcttctacatgtagactgccagttagaccagcaccatttgttgaagatactttcttttttctgctgatggttttggcttctttgtcaaagatcaagcgtccaaaggtgtgtgagtcaggtaacccagacccaaaaggacatgcatggtatgcactcactgataagtggatattagccaaaaagccccaagtacccatgatacaactcatagaccttaggaagtttaacaaaaaggaaggcccaagtgtggatacctgaaacccacttagaaggggaacaaaataatcacaggtggcagagggagggaggaaacagggtgggagaggggagggggaaggaaaaaaggaggggcaggaacaggtatggggagagacaggagggatgcccagaagaccaggagaatgaatcaaaatatgtagtagtaggggttagaggacaggggcaacctctagaaagtcccagagacctgggatgtgagaggctatcaggactcaatgggtaagacattagccaaaaatgtccaaaacagaccactgtcagttgatagacatggccccagtctaggcaaaggccacccactcatcttcaaaaattttaacccagatatcatatggtctaaaggaaatgtaggaacaaaaatggaacagagactgagagaaaggccacccagtgacccgcccaactttcgatccatcccatgcacacacaccaaaacctgacactattattgaagccacagtgtgcttgtagattggagcctggcatggccaacctcagagaggttctaccagcaactgactgagacaaatgcagatacttaacagccaatcattggactgaagtcggggactgatatggaagagttagaggaagaactgaaggagctaaaggggtggcaaccccataggaaccctcagagctcccagagacagcaaaaaaccaaggagcatacatgagctggctgattcatgatcctgggcacatgtgtagcagagaactgcctggtatggcctcattgggagaggatgtttttaatcgggtggaagctaaatgccccagggaagaaggatatgggtgggagtagggaactggaaggtggcaacttttggaatgtaaataaataaaataatttaataaagatgaaaaaaatgaaagaaaaattctactttttgttctttttgtattctaagcccaagcccaaactgtcacttcttagaattctgggtttttgtttttgttttttggccaggctatctataaatcttgaccacataaaatacagatgcctaatcatattatacaataattaaattttagtcttaactcatttgttttagttaagtctccatatttttatgataatgaaaaggcataaataaaattcatactttgggaaaagaatagattattgcttttgtcactagagggattttatatgtaaagcatatcatatgtatcacagcaatttcttttatagcctcttatcgatacaacagtgtgtgccaggttctgagtgacttctttgtcccaggcactgttgtaggtgctcaggctgtgttcatgaataaaacagaactctctctctctctctctctctctctctctctctctccccccgtctctctctttctctctctctgtctctctctctctctctctttcttcctccctccctccctccctctctccacaaatcttcattctattggaaagagcagaataataaacaattgacatggaatatgagcaagtcataatacatgaaatgatatgtgctataaaagagaaagaaagtcgagaggatgctaagaatgggggaggtggctgtggtgatagggtccagtggtcaaggcaggcttcttggtatttgtacaaagattggaaagaaatgagggaataagccaagcagccatgtccttcaatgcctgtgtaagcttgattaattcatgtccagagttatgtaagacatttgtgtatcatcttttcatatcccagccttccctatacaaagtggtctgctttagggattggtattacctttggtggaacttgattatggctcagtgacatacattgagcttattgttaaactatcagtaaggctgacccttgggaagttgtgttctgttgcttgtgtctgcctttgttatgttgtagttctcagtagatgtattagaaaggagaaacttggactcttaagtattgctgaaaaaaaatatctgaagttcatttccaagccacaggtattacaaactggatttcttcctggcagcctgtgacacgggtggtgtgctatagactgagagtctgtcccagtggtgctgatggagtggatcctggattccctccttgcctcttccctcagaaattgctgttttctatcttattcaggaaggagcttaacttggcagaggcattgaactcagtgtcctatgattccacttaacactttctcttagtctgtgtagttcttagattattgtttggaaattatcaaaatacactatcttttagtacttagttttcctaagtctgacattggtatattttatgttgcaaaatttaaactctgatactttataagtgttgactcatgaagtcttcacagactttaacaaaaatttggcctgtttttgttaaaacagagcacattaaactgccaaccagagaggctccttgaaatgataaacatttttgagttggggctggggggaggcctcactgggaaagggcatttgctatataggcggaaggaccttagtttgaaccccaggtgcccatttttttaaggcaggcatgaccatgtatgcctctaacctcagtgtttgtgtgcatgtttgtggtgggggtagagacaggaggatttctgggactttctggctgtcagcctagttccatgtttcagtgagaaaccttatctcaagggaataaagcagaaagtgagagatgaagacacacagtgtcctctggcttccacatgtacacaggtgtgaagacccacacaccacagcacacctccaccttgagttgaactggaaacttaagggttctttggaaagtgggttggatggtgttttgctgggacaaacacatgaaggaatgttttgctgaagcaggcacaggagagaggatgctctgctaaagcaagcacatgaaaggacaggtgatgaaagattctttggtgacgacacacatgtattggtctgccttatattttgtagttgagttgcatttgctgggttgacatagagaaaaacacaccaaaaaacttttggtggtgtactgcagtttgttgctgcttcatggactctggctaattggatgtacatgctgaggcaaggcctatgctgagcaagagccgtgttgaggtaaggcaggtggaggacacatgatgcttggagagtataaataggactccatggagtgacagagacagagcttggcttgctggtacagttaagctgtgcaacgcttgtgggtttctcatctttgctgatcttccctgagagaggcacagctgagaacttctcctggtgttcctgttggtcccatcggctcactctagctgaggctgaggctgaggctgaggtctggctgtctctgctaggtcatgtcaccacaagtcttcagaactgggctgctgttgtatccgtgaggtatttgcaagtggatccagctgctgctgcctgctaacttgtgaactgaactgtagatttccagataatacagatgggaggtgctccaaagaacctttctaaacaggcccacttacccggtatccttacttttccactgcttctgagttacaaggaaggttaaagtgtttaagaaccatcattaaaaatagaattagaaaaaatttaagttaaattgagtatttggagttgtgttgttgagtttgcatggctgcaaaggcttattgtcatgctttgattactctagcaaaaatcatatggaaaagagaatctttgcctcttttttttgcattgctcatttgctcttgaaagattacttcagttccctctttgaattcttcagctgagatctctgggtggttactgtgtgtaattaattcattgatcaaagccagaaaggtccctgatgagtctcagtggtaggaaaacagatgttcccagttcttcctgtgtgtctacttgacacctgttcaagacaaattaatatttaagaaacaaacaacccagagaattgcaatgtcttagccaagtatgttcagatgaagtgttaactaccatagtcgttatttgaattccatgtccctctctctggccttgaaatatcctctgctgcatgaaatttctagtagtgtgagagcttttaaggagaaaaagaaaagcagctggtcttacaaaacagtcgtaccttttaggtatggtgagtctagtcttgtagaatccaaaagaaaaactgagttggagtttacgccagtcattccaggcagggatataacagatgggctacatgtgggaatggagggccacttttggactgaggagaagctcagtgagtgttgctacaaggcagtgaatggcagaaatttgcgtttatttataccttaacgtatttgacttagaattagaaataatctcaaaatttcaaatttccaaaatttcatatttggaagcctgtcatctcttggtcataacactttgtatagtagaaaatttaatctaacatttactcatttattggttgtctaaataagcttactttaaaaagtcagatctttcattacaatacttttttgtgtttaatttctattgtttaagattgtagagttaaagaatatttttttcatgtagaagctcattgttgtgtatactgtgaaactgtatcagtttatggattattgtgccttttccgattgttgttttcttccctagtgacaaataatgcagccgtggacattaccgggcatcctttggtgatgtgtatgctcatactttcctttagtgcacacacacacatactttcctagggtcaacctccaggaatggagcagtggagtcaggtttgatggttttgagtccagcctttctggttggtggataaagtcaaactctttatattggctttttagatctgtttgtatattttggggtacaagttagtattttgcttcttttttttaaattaccatttttatttttaaactaattcataagaattctttttatatttgtgttatgaatcctttactagttgttagtttatttgtttgtagcccaggttggcattgaattcgtcacgtagctaaggatagccaccttgaactgttgatcctcttgcgtctgcctcttgagtgttgtgattgcagggtgcacaaccatggctagtggttgtatgcataagcttaccatcctcccttttcctaatagtatctgtttctttctgtttcccctttacacgtgtgtatacatgtgacagcagcagatatcttcgttactctattgccccgtgagacagaaccgcctctctctaccccttccagagctgaggtcgcaggcattctcttgagcctggcttttatatgaatgcttaggattggaactcacgtcctcatgtggcacctccctagtctgtctcagtgggaccttgtggtttcattgcctgagctgatgcactgatatgctgtaagtgcaacagtggccactccattcacagggaaaactggcattgctttagttctagtttcaaataatagaagaatatttcaaagtcttcatcaaatttaatcttttcattttataagtgagttaaaaatgctgtcttttagtagaattaaaggtttcttccttttgccaggcggtggtggtgcacacctttaatcccagcagttgggaggcagaggcaggtggatttctgagttcgaggtcagtcttgtctacagagtgagttccagaacagccagggctatacagagaaaccctgtctcgaccaccccccccaaaagttttatttttttctatttcactataaaaattgtatgcaaactggatttttttgtttcctttataaaacaaaacaaaactcaaaaattttatcatcttttcattgatatataatgtttttatgctgaacacaagaaataaacttgtaggtcactttcaggtgtctttatgtatacattaaagaacagagactcatagataactttaggtaagtctgttgggcaaatcagtaacttatatcaccaagtctagcttttccttctagtggctttatagtaatcattccagagagagtttatttagagatttggaagggaagaaaaaaacactttttgttagttttcttattcatacttttccctttttcctgtttccctagttttcattaaagcatatgatggtagtaattaagtgtttcacttccaagttagctgttttttttttgtttgtttgttttgttttgtttttttaattttattttaaaaaattttattagtcctaaggttttgtgaaactctttgttcttcaaagataggtcgtacttccaagggtaacagaaaatgaagaaggattccgtggtgtattgttggtacaccttattgcatagttgaagtacaaaaatgttgttttcagggttaaaattatgtatttgaggactttacatcctctttgaaattcataattaactgattctttaagcaggactttgtcttcttgtcttaatataagattatattcttcagttttatagcttgaaattataattttgtttccctgtaaatgtatttgggattacaactgttgaaatgttctctctaggagataacatagactcaaactatttgcagagactgcagagtaagaacttggagatggctcagttcctcagcagttaactagaccagcatgccgtttactcttagcattgtcagctcttctctgatgctgttacacagttggccttactgtctgccttgatgcaagatggtgtctgagtggagctgtctttgttctagttaatttctaggtagtagtgcagttattgatgataagtcagctgtgttaggttactgttgctgtgacaaaatatttgaaagaatgatcttaaaggcaaaagaatcattttggcttaagttttctactgtggtcccttggctccattgtttctgggagtgtcatgatggaagcatgcataccacaacatggagatcccagaagggactgacttcctcctcaggcttcctagctcctggttgcaggcagttcctggtgatcttggttggtatgagttactctgaatccctgcccaccctttctttccccttttactcttcttcattctcttttcctccctccagttttagtagtgtctggctctgaagcccagactgatctgaaactcacctcaaattcacactcctgcttcaatgtcctctacctcagttgtctagccctccccttccccccggacaggaagctctgaagtccacactggccctggcaagccctggctcccactctgactaggtgggtgtcctcccttgtcttgctgctctagatgctggtccttccctaggagttcataccctgtcttcctagggccctgctgtccttgggtatccatctccatgtttgctctctgtctttatgtgtctctcttctgttcctgctccccagccaccttatccttgtttgtgtctcctccccccccatgctggaggtggaatctagggccttgcacatgggtaataagtactcttattactaaactacgattccagcctctgcctccatttctcacttgggcgattccttctgtgtgtgttccaagtttccctttttataaagactatagtcattagattaagacctattttaatctaataaatctttatcttaatttagttatatatgccgagactctggtacatatgaattaatattctgtatgttagggcccaaacattactttgaggtgcaaatgggggtgtatagctgccactgtgatttgaagagtagaaacaagagagcataagtaagagggccttgtcctgtaggacagcataattacttagatgtagatggaggcacagcaggtgaggtatttgttatcgacttgagtctaagatgtgcggttgacatttatgcttcagtgtatgtagatctgataatccctcagggttcaccctcagtacatggaagtaattttagaagctcattggcatttctcagcatctcacaactactcacatgttgtggcagtcatttttatttttaaattgcatttcactttacatattcgccattcatttaaaacattggttagtattttatgatatgtagatttgctgtatttcctatttttcattaaagcatatgactgcagtaatggagttgataattaagtgttatatttccaaggtagcttgttatttttctaagtaatttcattcttaaaaatttttattgatcttaaggttttggaaaacattttattcttaaagataggtggtactcccaaggataatggaaactgaagaaggatttcatggtgtattttttgtggaccatgtttgtatcttaccatctagtttagatttaattagtgaatgctagttctgttggatgctgtgagtaggtgggaaatatgttgaatttgtaagatcatgatagtttccaggattattgtggttttgaagttcttttctattactaagagctcctcttcaaatagtgcaataaagtttaccttaccgtgaagtaaactgctcacactggcagtctgctcgtaggttgagtggaccttgcgctcttactatcctcctgcaaccccaactcctccaaagaaagccccggctagatgtgccatgtgccgttattagtttggatttctagataggctatcaagcagcatgataccttcatttctgcagcatttacttttaggatttcaaagtcaaaacactatattgtgccttgcatctatttagggctctgttaagtgaattgcatagtattaattacatgatattaggttttataaacactttcaactacactgaactgaaaagtattgcaatactagatataggtagtaaatacttaatctttgaattaaaaaatgaagaaaattagacttatttagattagaggtcagttgtacagtcaatggttattccaagaagtattgtcccactggagcctcaacatgctataattagtcaagatgggatcattattgattaacttaggctctgagtccaacaagaagtgagggtaagaccggagttagactgcaagctgaagagtgagtgccaagaattgtaccaccagaattcaagagccgggcataaggtagtttctctcttagagcccccagaaccaaatccaccaacaccttgactttggacttgtagactctagagctatgagaaaataaattacttaggtcaatacagttcatggtagttgtgctgcctctgggtctaagactcgttctcaatagaagctggctgccttcttgcttcaggggccctttactagcagctcagagtcattccagtattgggcaatgggctgcttgccacactgttgaaatctgcgtgtttggacaggcttgcttacaggttttcatagttttggttgcatgttggaagagcgggaacctagtaccctactcttagcatttccagatctagaaacttgctccagtgagggtatagttagtttgaatgtaactgatgaagaaatcttagttaatgcagcaactgtacagagcaggtaaagtgtaatagaatttttttctttcaagttctcttgattgagtttgtggctaatctgtccaggcagggagctccatttcagctgacacaggaacttagacttctgtcttgtggcttacccatgcctgagagccctcagaatctgctggccccagtctttctgtctgggcagtgggtggaaagtatgtagagcacagtgtagcgtgggctgtttcataggcagttctggaaatggcatgtatgtcccagcccacagtttgttggtcaggaccagtatacgacttcagttgcattccaggagagatggagagatgtaactatcacgtatattcaggaattaaaattcaagttgttaaaaactcaccagtctcaagctaaacagcacattgtaatttttgtacattcatataaaaatagatctattttgcattgtgtagtgcttgccattttaaagtgacaattacttttcctgtgtgtactctaagtatttcccacagttttagtgccatgttgattaatggcattttatgacttgtataacaataaaatctttaatatttctagaagagaagcttaaaataatgttgctgttaactctagacaaatattttgttcagttgtataaactgaagattattagagagtagaaagatttgctttgagacacccattttcctgtattttttttccttttcccaaaatttcagctgaaattttgtttgaattatttgctacatagttgggaattgggtttctttgggccaaacagattcgttgtgcttatttctctagtaggtaacttagagaacacatagtgtattccccatattaggttaggtgttgagcttgcacctagtgaaaagtttacaaatattttgcctgcacttggctctacaagtcaagggatgagattggacttggactccaaaacacaatgggaatggagatataaagctacaaaaagatcccctggtaaatactgtctggtttttgaatatgcctcacaaggaactgagtcagtactctcgatttgaaagactgttccatgtggctctgtgatagaaggctctgccacccacggtggtcaactgcaagtggagtgtggcgctttgaatctgctgctgctgctgggtgctgagggctgtttgctcttgatgaatgtgctcaccagggcacacagctctttcctcccttcctccctttgttttctttcgttcctttcccctttttgttttcttgtggtaaaaagatatttttaaaggtaaattagagtgtgttttagtagaaatacaaaagattttaccataaaaacatatggacttcaactcctctttttagggtattttctttcaataaatagttctttacttgtcttactcaaatgcaaatactggtgtcagcaaagtcaaactacttccattatgtagtgtgtatgggttcatttttataatatggcttggggctggctttcccttttcctcttttaaagttcttatttttcttcctttatttatttttttggtgttgttgttcttggaatgtctggaatgatggtcatttctattggtaacagatctagaaatggaagcttttgttgttgtttggttcactttgatttatagctgtttacagccatgctagaaaatgcagtaacattgaagaggattctgtagaaaaaatctctagcacttcataggacagaagctccgttatctactagcaatgggtcctatatggcatagttggcaagggtttataaagaacgacagcgtggggagggtatatggtacaagctggaggagatgaagcagagtctaaaggagagaacagtgtatcgattacaactgcagatatgtagagaatggaaatgtaggaattagtaactcacaactttataatactataaaagagattattcttttttactttcaaacttttgatgatgaagtatgtatgcatgtatgcatgagacagggtctagtgtagttcagattgaccttgaacttctgtgtagctgaggatgtctttgaacaactgatttaatacccctaccttccaaatgctaggatcacaggcatctgtcactctgcctggtttatttttaatattatattgagaaaactaaatgatcactttgtagctattttatgtgtagctctgaagaagtttaaacttcttttcatttcctatggaatatcataggagtgtggaatgttttacatgtatatttttagagattactaattagttgagggagattcatatgtttagaatgggtgaggcttagacagttgatgaagatgaggttattacactttaatttgtgtgtgctcatatgtgtatgtgggtataaacatatggagagggcagaagacagttgtgggaatcagtctttcttctatcatgtggatctaggagtccaacttggatggtcagccttgcctttcctttctaaaccatttagctggatcaagattagtattttaagtcagtttttgcacttttgattcttgactatttttctctaatcaacattgtcaatcacaatataattattgtgtttatattttttaaactgtatgttagagagtagaatggtggcatagattctccaacagtcattcatgtttggtattagaaattttatcttagcatttatttagaattgtggatatacctggatggagcatagcacacctaataaaaatgtctcacagtggaaatttgacttggatggagctgtgaaagtcttgtctagccttgtcttcctgattttcacccacatattgttcattacctttcagagactcagctccatcagaaggaagaagctgaacatagtatctattttagcaaccaaataggttttttatttccctctagatttaagaattagtcatcccttagatctctaaagcctcacaagaggtagtaagtacttttagttttctaaagttcaaatttgatttaagcctaccctccggcctgattgctgctcagctttctcagctccgtaaagctgagctgtttctcctcatttatggcattttaaacttaaattcctgtcccttgtgacattctttaatgcagaagtaccaaagtcaggaaagtaggtgatggagtctgccttagtgatgttttggtcagaagataggaattataagtagctcgagttgttgactgcagcagatgtgtggcctgcagacctggacaggtctactatctgtcacaacaaagacaacagcagcaggagttagtgcaggtattactgaaagtaggggggcaagcaagaaagacaacttaaggagatgctgaaagactgtagggatagtgtatgaagttctgcatagtgaacagtattagcctgccatttaggagaaacaacaggtggaagactttgggctgagagtgaagactaatttgaaaatttccaaatgtgttttctttgtcagaagttaagagcaggaagtcatcccaaccagccactgtgctgttgtcttttgtcaccatgacactagccagagtgaactggcttcaaaacaggcacctcactcccctaaggagttactttgattaggctgggctgtgggcttctctctgggttattttcttcatcagtgagtgatgtgggacaccctagcccactggatagtgctatccctaggcagccgtcctggttatgtaagaaagatgttgaacaagctgtgaaggagcctttctccaggtctctgggaaagtttctgcccccaacgtcttgcttggcttctttcagtgataaactatgatgtcacagtgcaagccaaataaattctttcctccccaggttgagtttggtcactgttttattatagacacaaagaagcaaactaggattgctactcatctattgctcctggaacccgagggagagagggggagagggagagagagagaaacatagttatagtcactgaatgcaaagttgtaacaaaaccatcacctaaataaaccttctgtaaaacacacagcccaagaacagacctgagcatccactactaaagccagctaatccactgttttccttggtgtctagaggatagagttaaaggtgcctgagaacttaagctagttcatcttacctccagcctggttcatttgcttctgtcgttcaagttaatgtaatcaaatgctacagagcctctgttaaaggagccattgcacccagtgctgaagttggtgtgtcacaaactatactctcactgaattctaaaactcagttgagtctaaaactctcggaggtgaaaccctacaatctgttttgcaggcttccaggtgatttcctgtgtatgttaaaaagtttgaggccttccactcaaaatggattccattcagtatttatactgagccatacagttacaacaataatctcataatttaaaagtttataactaattttgccatagcttatttgagagtttgctctggtagctttctctccccacatttaaattactttagctctgtttactgaagcattaagaccactggggagagtatacattttctggcactacttaatgagtattgtaaagcaaattgcaacctctgttagtattttcaaggcttaagagtctccaggagcttgagagctatatataatcccagtcaaattgaatagctatcaggaagaagcaagaattactgggcagctgatttgatgcattttgatttgaggcatgaagtaaccctcctccaatccagttagtggctgcttgtagttttcattagctaagagcaagcggacttcaggctgtttcagggctcctgccagggcttgtcattgtgaccttagcttcttcgtctgagacaaaattactgatgtggtttgggactcaggtctctggactcttccagggtcattttagtctatttgctggctcttgaagtggccctagacaggtgattaaattcatcctttctatcactgcaactagtcaaaaggatttagggatttgagtccaataagaacacactttatagtttattagtgcttaagctcaaaagatagtgctgttgaagtgagcactgagtgctgtcactcatccggggccatgttgaatttctccacgaccggcagagtcctcagatacacctaggttttgttcatgaaggctcatagcatttggcagttgttttggcagcttaatgtcctattactctttctttactatttccaggttcaatactttttacaaagttttatttatttttatccttttagagaaaatacaagccactatgcttttgctatattcaggaaacagaactaagtgaaaccagcatagtaagtgacactagtccgagtcctcaacctcagtggctcagagttgtaaacctttgtttccgtagtttctctgagtgggagcttgggtgtgggcttgctgaatgtctggctgcgggtctgctgtgaactttgcagacatatatcccaggaactgcagcactttgggcttgactgttccgttaagacttacatgcaggtggttagaggcctcagttccgcactggctgctttggagaagtccctgtacctcctttctttggcccttcatcagtttgtgtgcattcctccatgaccaagcagcggctttgccaaagagttttgtctctataaagtcctagaaagtaggtgtcatccagccctgtgccttttatgacccacttttggaggttgcaagcggctactgttctttttattaagaagctagccacacagaaggggaatggaaggtagatcccgcttttgggggaagaatgtaaaagaatttgtaaacatggatgtgtgtgtgtgtgtgtgtgtgtgtgtgtgtgtgtgtgtctacttgtgtgtaggtgtctatggagatctgcacaagatggtgtcagatcctctggatctgaagatctgaagctgcaggctttttttttttttttttttttgagagacagggtttctctgtgtagtcctggctgtcttggaactcactctgtagaacaagctggcctcgaactcagaaatccacctgtctctcctcccaattgctgtgattaaaggtgtgtgccaccacttcccagtgctgcaggcaattttaagctgcctgacgtgactctggtagtggatctcaagtcgtctgcaagagcagttcacactctcagccgctgagccatctcttcagcgcccctgcctcagtaggcaaagaaacttgctgtcaagtctgatgacctcagtttgagccttcccacatggtagaaggagagaactgacttcttcaggtctcacaagcacacacagaataaacaagtacataattaaaaaagcaacagcaacagaggctctagggagcactcagcacggataattcactggcaacaaaatcgtagttccgtgttttcaggaagcaggctgcataattagagcttgggcgctagagcgagaagaggagctcagggaggtagagttcttgaaagctgtagaaggtcctcactgagacgtagtgaataccaatcagagcatgcatgtgaggaaagtatacagagctgggaaaacactgaaacagactggcagaggtcatgcctgatacagatgtggctcaggaataggtcaggttcctactagccagagtggaaagaggacttatcagagtactggttgctagtattattggctcaagattgccgtcttacaaatacatttacaagaaatacattgcttccaaataactgttctagaacagttctgtactatttgtggaaatacaaattagcattcacaaatcagcaaacacaaattagaattcatagcaaatggtattcaaacaaaaattatcagtgatgtgaaaaaaagacccatatggagaacagtctctgagcgaaactgacatagcagcagcgtaagggacaggattaactgcaaggatatagacacagctactgtacttattctttgtatgaaagtacttttgtgtgtgcgtgtacccaaattgagcttctggaaatcgcacatatattagaactgatttaaaacaaaacagatttaaacagtcagaacaaaagactagtaaacagaagatacagtaattggcacagccagtaaggaaagcaaacagacagaacctcatgggtttatgatttcaagtatttaatttcgcatgtgcagttggaaacctccaagggaactagtgagctcagagaaagtatttgaagtactaatagttggcaacattctcaaatttaaccatcatttctaagtcttgtgtataagacatgtaaaggaatatatcaaagtcaggtttcagggagccaggaaaatactgagccggtgaagtgctggccttgaaagtacaaggacccatgtagactctcggcctggacatgcctgctgtggtgtcacaaaccagtaatctcagtccaggatggtggaggcacgagaaaccgtgctgctaaggctgtggacagagcgtcccacactcgtgattttcttctggcctgcacgtgtacactctcctgctaccatacattaaagagaaaaaaacaattgcttaaaactagcaataaaatcttgaaaaagccagcaaggcagcagttacatgcacacttatagcagcacacttcttaccagaattagaaggtgctggaagggcatcttcagaattctgaagaaaaagactgttaacctagagtacagtgcgatattactaaaaaacaaaggaaaagagggctttctatacacaaaagctgacaggcattattagcagatcccagaaaaggctaagatgttgaggcagaatgaaaataacctcacatggattggatctatataaaggaatgaagagtactgggaatgatagatataaaagatatgagaaatctcaaagtaatttaatgtttatagtaaaacttaaaaatgaaaaaaaaaaaccttaaaaatgtttggaatgtaatttgagaaaatttgatagactcttgcccttaatgttaacatcacttattttcttgaggtcagtcacatgaattcaattgtacttatataccagatgtgatatttatgtatacttaccttttgaattttattttatatatgtgtgtgtgtgagtgagtgtgtgtgtgtgtgtgtgtatagatagatagatagatagatagatagatagatagatagatagtgtgtatgtgtgtgtgtgtctggggcctctgcaagagcagtaagtgctcttaaactctgcgttctctctccagctttctatacatgtttgtttgtttgttgtttgtttttgtttttcttaatgttactccttctggagtccacagctttctttcatgttatttttaaagtgactttatgtggtatagaaacattaagcagatggtttgtggtgagcacaaagttgaaattcatgagtataaagaatacatttgttggaggaaaatcttactttgcaaaatgagttccagatgtattaaattttttagatttattgccataaaacagaaattttggtggcaatgctgaaagcagcatttggtctgtgactaccaggattccaaaattgtaggtcttttagagttgtcagaaaaccacgtggttctgatacaggtctctaaccacatcctgagaaatggtgcttgaagctgtggattcaggaaagagtctcttaatacccctagaattttgcataggtctagtttatagtggaatttttcttttgttcttccttccttcctttctttcttttctttttcttttctttctttctttttttttggggggggggcggtgatggctgctaggagtttattttctgcttggtgcaaggcatagttataagatcaggagagctcagtgctgtgagccaagagatgactttgtccagctcctgctggtgtctgttgctgcagccctcctaatttactggatgaatggatgaagcttgggcctagcagcacttaagcttgtggtggctaatggttctgccagcttagcacgggttcctagtgttggcctgcccaagatggatgattgattgtttttcaaggtttcagggatgatgaggcttcggaggggagtgactggggaaggaggagccttctgctcaggagactcagctctgtatcactgaatctgtgaatgaagggtgatttcctgaaaaagaagctggcccattagtggctggagttggccttggagagacccgggatgtagggcatggtgtcccgtgtgtgtgtgggggtgtgtgtgtgtaggggggtggtactaggcacttctgtaactagcagttgcaggatgaggagcccaggcatcactgcgctggaagtgatggctgacatgcttcagggcttgcattctgcagggacctcggtggtgacttctccttgtgggccatggcacatcatgggtagcaatgcctggggcattaggctgtggggcctatttgcagggataacccatggaagactgatactcaggatgcccatgatgcgcatgtgcatacttgctctctctcctgtgcaaggctatggtggacatgtcattaccaaagccaggaattgtactataagaaagaagtgaaaggaaaattgtcttttgatgtgggagaaggggtgttcaataagccattaggaagtagatccttgaaaatcatggtataatttcctataaggggtcataacctcttttatgggtcagtgtcttgggggggtagtatagataaccattaaagaacattgcatatttatatgtgtgcatgcatacatacatgcatgcatgtgcagcagaacagaggacagcttgtgggaactttctatgtatcgtgtgggtaccagggattggattcagaacttcaagcttaggggcacgtgctgaacctgctgctaaaccaaccatcttgctgactttagagcaccagttctgctatgtgccaagtgagcaggtagaagcaaaagtatgcgcatgtgtttttaaatgtctgttgtcctatgtctgtttcagcctgaaatttgttttcagagcatatcctgagtcatgagaatgtcttgagcttacaaggggttagagtaacatttctgcagcccaaactcttctcattggcttagctttaaactggcagacaacaacttcttggatgttactgatatttattagagcactagcaattggaataactttaaattacagtggttgtggctacatagtgagagctagaataattccggtgttgaagaataaggaagtttggcacaaaggagggtgtgcccgtgtgattgcccaggtgtgtattacctcagtcacctccgtattccccagcgtgcagctggtacacagccagttctgcaggtgtgtctggtctggaacacccaggaagaaacaactagagtgaaatgcactcagaacaacaagggggtgggggtgggagtggggtnnnnnnnnnnnnnnnnnnnnnnnnnnnnnnnnnnnnnnnnnnnnnnnnnnnnnnnnnnnnnnnnnnnnnnnnnnnnnnnnnnnnnnnnnnnnnnnnnnnnnnnnnnnnnnnnnnnnnnnnnnnnnnnnnnnnnnnnnnnnnnnnnnnnnnnnnnnnnnnnnnnnnnnnnnnnnnnnnnnnnnnnnnnnnnnnnnnnnnnnnnnnnnnnnnnnnnnnnnnnnnnnnnnnnnnnnnnnnnnnnnnnnnnnnnnnnnnnnnnnnnnnnnnnnnnnnnnnnnnnnnnnnnnnnnnnnnnnnnnnnnnnnnnnnnnnnnnnnnnnnnnnnnnnnnnnnnnnnnnnnnnnnnnnnnnnnnnnnnnnnnnnnnnnnnnnnnnnnnnnnnnnnnnnnnnntgtctcctctctgggagagaatctgccacatacaggaagtcttaaactggattcatgtagtagctggcattggttgtcagcttgacatacttggggagagagaaccaaattgaagaatgcctccaacagattggtctggagcatgtcagtgggacagtttcttggctactgattgatagaggggggccctgcccactgtgggcagtactgtgcctgggctggtggtcctgggcttataagaaagacagcaggtagagagcaagccagtaagcagtcctccatggactatgcttcagctctgtccttcagaatcctgcctggagttcctatcctggcttctttcagtgatggcctgtggcctgtgagctgaaataaactcttcttgctttgggagttgtgtttatcacctcaaaagacagcacagtaggacagcaggcatcttcctttctcagcataaatgagcatgtgcagactgggaccctgagagtggagtggcaggctctgtgtgttatgaacagtgtcctgacttcctgcgtgctgtgggcagattggcactgctgtggcagcacagaccccttcctgcgggaagcttgaggatagtttttgactgggcactggctcaaatgactatattgtcacacttagccttgcccagccagcataaaattggaagggtgaagtagtcattttataaaaacagtttggtatgctggagaggaagtaaatgagaacatgccattttattagaaaataacatctctgcccaactgtgtttattgggtgagttcaaaactctctgaatcctcttgaagtctgttttaagtgctgttggctcttcttgctccatgctcaataggcggcaggcatctgtcaactcttgggatctttgtcggtgtttctttaaattttaaagtctcattttttattgtgtgtatgttgccatggagtgtgcctgtgcaaaggccagagggcagctcttctgggagttagttttctccttccaccatggttctcggggtcaaactcagttcttcaggcttgcaccattggcctgatattgcaccattactggcctctcaactgtttgttcatttttaataatacagtatctcttgaactttttaccctcctggtccttggtggctagagttctaaatacctcatttgtcacttgggtcctgatgctggacatctgtctcattttttttttcctgatgtatctgacttggttgatatttctatagctccatcagtgtggtgtcaagtcagagcagagtttctgctgttgacaagacttggctgaaggcagtgtcgttgtgttcccgtcctctttcagagcagtagctcctgaagcctcgccctgcatctctaacttggagtgctgttctctgcctccactgggctgcactgatcacaggggccgcagtgctcggcctgcatcttgtgctaggctcctatcagaacaagcactttacctttccttttcagtaagtgcacattgggtaagcatagggaataccagcacttagtactactaagactgatcattaatgaagtgtgagatgccgaatgtttattttctatctgagcccataatattttcttcttggtttactaatgactagtttagtaatgactagatcttgaatccatctgttataatatatataataaataataaagaaataggtaataagaaagggcctaaaacagtcttttgcttgtgtttttttttaaaggttgcacttcacttgatattaaaatatgcatcaggaataattatggttgtttttattgccataattccacagtgactttgactgtatgttcttttagtcataagttagttttaaccccctaaattatgcttcctaattaatttatctggtatacagctggggggggagaactcatttttaaagactaacatataacatatttgcttgcgtttgttttaggaaagcctcatagcactgggagctctgagcggattcagctctccggaatgtacaatgtccgaaaaggcaaaatgcagttgccagtgaaccgatggacaagacgacaggtcattctgtgcgggacgtgcttgatagtgtcgtccgtgaaagacagcgtgagtgggaagatgcatgtcctgcccctcattggtggaaaagtaagtaaagcaagaatactgacacttcttccagcttagtaaggacctcccatccatttctgtaatgagagggacatggatttgacctgtctgaactctcacttttgctgtgtaccactggtgggtattgttgtttattggagctgtagaaacaacagtgcccgtgaattacaagagaaagccgatcaacagagtgtcattgttctgttttagagtgcagatgataatgtccttataagtaggtatcctttgtgctgtcaagccagagcccagagtccaggatgctgttcctaagtctgcgtgtagaaataagcaagtgtgatggaggttaggatctgctggtgctgaacttggtcgggccagactcccattgccttccgcttactcctgcttagtgacttagtgggattggcatcctgagtttactgtgaactggaaatggcactcagacaggtatttccagcattatcagttgcttttccttgggcatgttaactattttatgctcattaactattttatgctcattataaagtagaaccatttttttgagggaagtattaaattctctgttggcatagcatcactataatcatatgtaaatgtttgctattttaaaaatgatgtaatttgttgaagaggaaagatttagataagaaatggtttgctggaattggggacatctgaaaggagagttctctttatattttttttcttcctggatgggaaaggaggtagaaaatgcaattagagaaaaaattcgaagccaattttcattaaaaaaaaaatccaatcttaaaaaaattgacaaatgtcagctgtgttctaggattcggaattgaaggtcagactgtatgtgcatagtgggtttgatgctcagcagctctatagtctggcctgtccttgtgggtgccctgggctagttgcccaccctctactgtatacactagtcccaggaagactgaagggcaagtttcgatctattcactctcccattttgaaagcactgctttttaaccttctctgagcattaagactagtgagtgaaactgtgtatttagtcaaggatagccttgaactcctgatatcctgcttgggatcacaggcgtatgccgtcatacctagtgtcagtttcatgtggtattggagattgagcccaggcttgacacatgctggcaagtcttctaccgagtgaacacatctacagtgcattgcatgcaacctgttattaaacattttgtcttttcatggattactggaaattttgtcattcatgttgccatcacagacggttattttaaaatgcaaacatatttaatgtttgatgctgttagatctaaagtctctctctgtgatgctggcagtttgaataggcaaatgtgaatataacattactaagtatctttcatgagcgaaggcactacgtttaatctaagaagtgagagtcacgattggtgcctttgaacagctgattccatatcaggagatgtagggtgggtacaccatcatctgcattatagctgtaagagagattcagaaagtaagagccctgtgggatgttagtaaaaggccaacactttgaagggaagagagaaatttttgatgaaagacaacaataatagaacttgaagggtgaaacatattttgagatatatagtggaaacaaattgtactcagagaggcagaaaagcccatggagtgttcaggtaaggtcagaaaaagctagctataattagcattgccattcagagactcatcctgtttcccaggcctgttattggatagacttctagtattgagtgaattgaaagttaatagcttccgctttttacaagtagatcttgtcaaacctgctttgcactgttttaaaataatggagcttgctgaagacctgggtcttttaaaacccgttgacccagttgggagaaaataattcactttctgtaatttgagctttcattaatgtttgtgtatttctttttgtcatcctgtttcagctggtaaaggaaaactgagattcaatgcaagaacctttttcctttcttcttaatctctgtgtggaagagctagaagtaaagtatgctgtaggctggtcaggatctagtggtagttgctatcatctcagttttccacgtcaccagagcatgatcagtttacagttttcaaatgacaagtggcttcattgttaaaggaagctcacttgggccagtgaattgtccccatggctagtgacatttgctgccaagcctgatgacctgagttcgatccctgggacccacattggaagaaaggcagaacttctgcaagttgtactctgacctccaaatgcaccttagcccttgtgaacatggacacacataaataagtgtgatattttaaaaagttaaagctctcttaaatgctgaaaaatattttaatatacatttttattcattgtgtagttattctaatttactcttgagagttaagcagatttttagataatgtgtttaagtaaggctttttaatacctattcaaataaagacggatgaataataaatgaaataaatgtttaccttttgttttgtaaattacagagaattttctaggatggccataactttagttttgaatgggtgagtttattaagcatctagcaaagaaaaataaaagaatgaatattaggtatggaggtagatgataagagaagagcatagcaaatatcaagtcagtcagtgcaatatgggttcatattgttgctccttctatagggctgcagaccctcaaggggtgtatcttgctttcttcttagtacccatgttttcacttccatgcttaagtctgcattaaaagattttcattaaattttaccttttcttcctaaattggctactcttaaattctttcagcaccggagtgatgaatcccaatttgacttgagtcaaagtcctggaaaatccaggggaacttcttatacttaaggtggcagtgggagctgtgcctctgccccagaacactgataggactgtgggtcggggggaacccagaatacccacacagaaaacaacaatacttaaacactaactttgaggttataccatggtagcaaccccagatcttgatggtttctagcagtgatttctcattcatatcacgtgtctactaggagttggtggcttttgaagttgatatcgctttctgtacacgtctgtaggaccttcctggtcctctgttcttctgttgtttaacatacgtgccctatggcagaggaataagtaactgttatcattcactgcttcttatctatttgaagacttagttttatttgtgtctgtgttagtgtatgtctatgtgtgaatgcaggtgacaagggcattgactgtcctttgactcattcaccgcctgctcctctgaggcagggtctcttcctgaacctcacgctcaggaatcttcttggctggactggaaatcaacaagctccagctgtgtctctctgttgccatgcacatgggagctatagcctattgaccatagccatttgtaaggaatgccttgtggctttttaattgctctttccagccctgctcctgtatatttagatctgaaataatgagacacgccactcttatcagcagcttataggcagaattggttataatgaatttacctttgtaaggactttgggaaatgcttagaagtaggtggagtgttgctgaatagcactatccttgctgcaaaggatactcttggcattaaaaggggcagtgaggtttccagagtcaaacaccatagtgggttagaccttgggtcttgagtagtggacaactcaatccaaattcctacaatgacatcctagaagtatactgttcatgatatgcactacatagcagctactgagttctaggatgtaagtgatacacaatttgtttgtcaaggcactccagagtacatgtctgattatctttttatattattaccatgactttatattaacttagagtgtatacccatgttaagtgtacatgtgtgacatggtgtatatatggaggctagaggacaacttgggagagttgattttctccttctatgatgatgtcatagaaggaactggacatcaaattcaggttgttgggctggttagcctttacccattgagcccccagatcattcttttaaatttaagatttactttctttgtgtgtgtgtgtgtgtgtgtgtgtgtgtgtgtatagaaggtatgtacacatgagcacaggtgcctgtggaggccagaggaggaagtcagatgccctagagctggtgttataggatgttgtaagctgcctgatgtgaaatcagaactgaggtcctctgaaagagcacaatctctcctcacccaggagctatctcttcagctccattttctgtttttgttgttactctcattcagtttttggttttgctagtaaatcagttccatgctatacaaattaattttctttcttttctaaatattagaatatgttaatttccacttctatttgcttaatttcatctacatttttaggtcatagttttttaaagcctatgaagtgattagcagtatgtcgttggatagcgtgtcatgtatggggttggatttgtagctgtggatttgtaggaacatttgcctagcatacacagactctggcagtcatcagcactaaagaaaaggtactttagaagtacattaaacacacacacacacagactattctaaacatgcacagattttaaactaattttcattaatggcttctgagatcattaccttttaaacatatatcataatgacagtttaagaatcattttgtacattctttgtgacttggcttacagttaggtcatttttgtcaagaaagtgataggagttggtgtaatatgttttatttaatttttttctctttgtgaagaatttactgtgaatggaatttttttttttttgctttgtgttttgttttgttttgttttgtttgagacagggtttctctgtatagccctggttgtcctggaactcactttgtagaccaggctggccttgaactcagaaatcttcctgcctttaactcccaagtgctgggattaaagctgtgcgccaccaccgcccagcattgaatggaagtttattattttaactataagcagaagaaacccaaagccttgttgtaaagatattctgtataaagaataagaaaggaagagcctgtactgattttcaatgggaagaagggaatttcacctgggtggtaagttctaatgaagataaaaactcccctttcttgatttccttgtaactaaaattggttggtcagatgcaagaatggctgcaagttctaagaggagcgtaagtggggagagatgcaggtctggttagggagctgcgcccccatgcactctacttcacttggttttgtgctctgcatcttttcacaggtggaggaagtgaaaaagcaccagcactgtttagcgttcagctcttcggggcctcaaagccagacttactacatctgctttgatactttcacggagtacttacggtggctgcggcaagtctccaaggtaagcagtactttcataggagcctcacttagttccaaaacacagttttctacattgtgtttttttctctcagctatactgatgactagcaacttgcagtgtttaaaaactaaagatgggtgaaaattaacacctcccaccagttttaggtcagtatcgctggctttgtctcctagcctccaaacatagcattttaaagaaaagttcatgcatgtgtctgtcctcccttccttccttccttccttcattacagaatttcttctgagtttttaaaatcacccccccccaaaaaaataaataaaataaaatcatctccatttctccttctccccctccaactctttttattctcccattcattctcaaagttgtaacttctttagttattaggggtgtgtgtgtgtgtgtgtgagagagagagagagagagagagagagagagcgagagagagagagagagagagagagagagagagagaatgtcgactgagtcagtgttgcttgtatgtccgtgtgttgaaggtttagggccgaccacttgggcctggataaccatcaggaagctcacccttgatgccccctctttccccagctacgcattgtctgcatctcttttcccagctccgcattgtccgcatctctttccccagctacaagttgtccgcatctctttccccagctatttgttgtctgcatctcttcctctggggcagagtcctgtgcctggcccttcaagatggccacagtggtacagtagttgcattcatttcctgagttagttgatagttgtctaaatgggcttcagatccatccactcatcgggaggggatttatgcctgccattataaatctagatctagtcagctaccagcggctagagaggtcatagatcctagagaggatatacgatggccattttcctaaagtgatataatttgtaactgtattttaaatatttactcttctattcccaggtaagtaagtgtacctttcaccccactcagagaaactctgtttgtgcagcagatggaagttgttgcaaggatgtgtgaatgtgaggtacatagaccagaccaatgtatctgcaatgcaagtcctacacctaaggctagagacagtcgctgaagttggttggcagaatgattgtaagaacctgaggaccaggatgtcttctgcgagatagtgtcttctacatgtgacacagaaactgcacccataaaatctcaaaatatggttctttaaataagagcagcataatggaaatgagcctttccaacttttgtatggaggatggagagatggctctgtggttaagagtgcttgcggatcttccagaggacctgggttcagttctcatcactgacaaggcagctcacaatcacctgtaactccagttccaggagctctcctctgctggcagtgaatagaaataaataaatggaatagaatagaatagaatagaatagaatagaatagaaaaaaagagccataccttctttaaaaaataagtaattttttttgttagagtttagtaaaccttaaatttcattgaatagactggaataactatcttagtgttacagatcaatgacagtagattgagacgactttagtgactagcccaggataggataaatacagaagcacagaatatgctagaaagctcgcaagcttccctcatcttctgattatattttcatatataccatttaactctatgtagcctccattttttaaattctgctttattgagtgattccattcttttttatcttactctggctattttatattcccctagtccctcgtgtgttgtgcatgtgtagttgtcccatgaaataaagccctggtgtagaaccacgataccatataagtaaggtgagcaaatgctgactttccggattctttgtgagcaggcagttttgcatctgatggttaagtgatgggttggattgttgcactaagtgctttggttttgggtgtgtgttttaaatgatggtgtccggggtgcaagaacattaccacagaattcattgtcatggttttaaatttataatccaatttgttccaagttgagtatgattcataccgctacatgatagagctatttgtcaagcaagtgagtaagagaataactgtggaaacagttcatggaaaactgcagtctgacatttccaagcttttctgccgtacttactccctcatttgggtgacaggcgagttgctgttctctgatgagggctggctcttagaatctttagcttttctccctttcagaaaagctttggcagattctggttgacggaatttaagactctcctagcagaggcaaatgtaggttctaagtgcacagggaagcagtttacagctgaagcgggaaagatggtgcttgcctttcagtgatacctgtggatgaagtatgcatatgcgtgtccaagtcttttaaaactcatcttgtgctgagccattaggagtcaagcataagtaatatactttgtattagacagttttagatgtgtatccacagttaagtgacactgtgtgttcaaagcagtaaatcagttgcttatgtcctccttcccccagaatacaaaaccagcacatgtcaagtgaaacagtttcttctgtactgagatagtgatctgaaacataagcctcttctttaattgccttgatctgatttaatgcttacggaagtgtcgtaaggaactgtttccacatgacccttgttgagtttcctgaacatgtaggcatggtgcatctgtcagaaccaggagactgacagaccctattggcatgtcactctggactgctttcaagcctgtttccttttctgttccctttctaatccaaggtaccacacttcacttggtatttatgctttcttgtcctgcttctgcactacagctttttatgtctattttctatgactgacatttttcaggagtacagttgagttgtaggatgtcctgtatgaaatacttttgaccttctacaccaaatacatactaatgtatattagggcagatgtgagcagcttatattaaaaacagatgagaaataaattcttagtgataagagtgtagacaagagcatatataaactgccaagtaaactacagcagattgttgtggttaacacagttataacaagattgtcttgtctgttgagcaccacacagttggtaacttactattccaactctgtcaagcatttactcagtaccttctattggtaaggtgatttatttgtagagatcatagcaaagaaaagtccagtccatatcagttgcaggattgtgctaattaagtaaatggacaagaaagcacttaacgggactgcagaggtgagtcagtgatgtgcttaacatgtgaatttggttcaccacacccttgaggcagctcacaactcagtgtaactccaattctgatgctcctctctggcctcctgggcaccaggcatatatatgatgcacatgtatacatataggcaaacacaaatgcatgaaatgtaaaattaattaaatttgaaaaattttaaaagaacttagttggttctcataatatgcagacactatggcagatgtcaacaagagcctgctgacaggagcctgatatagctatctccagaaggcctctgccagtgcctggcaaatacagaagtggatgctcacaatcatccattggacggagcacaaggtccccaatgaaggagctagagaaagtacccaaggagctgaagaggtctgaagccccataagatgaatatcaatatgaactaactagtacccccagagctccctggaactaaaccaccaatcaaagaaaacacatggtggaacttgtggttctagctgtatatagagcagaggatggcctagttcgtcatcaatgggaggagaggccctaggtcccgtgaaggttctatgtcccagtataggggaatgccaggactgggaatgggtatgggtgggttggagggatggggaggggaaggggataggggattttcagaggggaaactaggaaaggggataacatttgaaatgtaaataaaatatctaattacaaaaaaggaaaaaaaaacttagtaggttctcataatatgtaatacaaggtgctaggacagagggtgggaaagaagggtcatttaaagaaaaatcatggaaaaggagtgtgattgtttgaagatctggtgggacaagatttccaggtagaggttaaagacaagaaaggccctaagtctacaaagatggtgtcttagttagggtttattgctgtgaagagacaccatgactgaggcaattcttgtaaaggacaatatttaattagggctggcttacagtttcagaggtttagtccattatcatcatggtaggaggcatggcagcatgcaggcaggcagtcgtggtggttgaagaaccaagaggtctacattttgatctgaaggcagccaggagaagactgttttctgcgagcaggcttgtaaaggacaatatttaattagggctggcttacagtttcagaggtttagtccattatcatcatggtaggaggcatggcagcatgcaggcaggcagtcgtggtggttgaagaaccaagaggtctacattttgatctgaaggcagccaggagaagactgttttctgcgagcaggcagaagttgggggcagggggtgggggtctcttccgcactaggtagagcttgagcataggactgtaaagcttatccccacagtgacacactttctcaataggccatacctattctaacaaggacatacctcctaacagtgttgctccttgtgggccaagcattcaaacacatgagtctatggggaccagacctgttcaatccattacagctggaatcagaaataaggaagggaagtcacaatgggcagatatcttgtgctatagagatgtagtactttatgttgtgtatgtaacgacaaactgttagtaagcattcttctgtaaagttccatgtgtgataactgggggagacagaatcaaggggctgcttaatctagtagagatggggttgggggtggtaacacttgcagtagaactggagagacatggagaacagcccttgggcatgtgttttggaggttgacagagttactaataaattatatagagggtgtgaggagaaggaaaaaaataaagaatttttaggatggggctcagtggtagaatatgttcaaggccctaggcttaatctctagcaacacacacccacatgcacatatgtacatctagaccttcaccttgaattgtgattaaagccccagttgaaaaatcatagcaccaactgtactctgcatctatggtttgaatggtcaaagaaatgacgttctattctactaaatgagtagacaaagaagcaaaacacaagagacagtttcacgagctgtctcctgagtagagtgagaacatgtttatttctagcttgataattatgattgtcaagtgttggcttggctagtgttctttcttagttgtggttggctaatgtgctatctctgtcatttagtgctgtagtctttctaacgagcctctagttctgattgctcagattatgaacagatttagacagcagagttcattggaaggcagtgtaggacattgggtgtgtgtggcatgagtgagaacatggaggtagcagggtaaggggatgcttctgccagttttcctttccactgactatagccactccattaggaagaatttgctaactaaagtctacagtggtggcacatgtgtattcctagctctgggaaggctaagggaggaggagcctgatttcagggttaggctgcgctagctacagttagagtctagcccaagaagaatgtgtttgataactgtgctgaaatgtgatatcaatgtgtagaagacagcatgctgtgtgcatatgcagcactgtttgcatttgtatttccaaaactgtgtttttaggagggaggaggaacgctgattgaactacttgattgattactgttaagtaaattaattaaaatgggagctttaacatctctgttcccttattaaggctttgagtgttgggaggagctatatgtagtgaagtttagtaatctaaataaggcagtcattattattctattacttcctggctaaatggtttaactgaagattcaaatattaagctttgttaactgatagaaggaacaataatggtgtcacttatggcttttgtgaaatgtatgtgtattggacctgtacaggtataataagtatatgtttctgtgtgtatgtgcatgaccaagcaaatatgttaagttagttttatgactgtaatttatgccatcatcacatgatcaggctgttgtttgaagacttatttatttatagtatttccagcaaataaaagaacacatgttttgttaatccaagtgaggcatattctgatattctcagtcataggaggtattttaggaaggtgatagatattcatgtgagaaggcaggggtctgggaatggcttaatgtaaacattagaaacagtaagtctttcctttctacaaccttaaacaccagatacctatttttgagcacccggtatgatgcagataatctgtaggatcctagccagtgtgctctaagacatggctagctctacaagactacaaatgcttcattttatcttattttatcattttatttttaaaaaataatgtctagtgatcaaaaacaaattatcaaagtgagctgtcacagagaaataaatgaagaactcctcatttgggtagaatttctatatgacattctggccaatcctctgtttaaacccctattttaggaataaacatatgatagtgtgtttaaccccgaatacacggagagtaatttggggctgctaacagaaggtggggtggatcccgcttctactcttaattttgattgtcatctgcgttctttatatgtaatattaggaagctggatactttttagtcatactcagagtcactatgaaactatttctttttcttttctttatgttgagaagaacataaaatctattttaaaaaggatttataaaaacaagcaacataaagaaaaatctaaattttatattttaatattcttttccctactgtagtcatgatgaaaagatacagataaccaaattccaattatttttttttaaatcaacatgacctaaataagtaatttcagtgtgtgcttttggattttagcttgtagagaagtgtttttgttatgtcagttgtttttgagaaaattgttaaaagtttactgcagactaattgtagcacttagcattgcttgccagaggcaggaggagctttggggtttctattgggcgtgtgttagtgaagaatcctttgggacagtgacaccattggatttgaagtcatctcgaaaatacgaatgtgcagcatgttttagaaactcagtaaacaatgagtttactgagttgtatgcattggaaaagggggccatctgtttattcagcatacacacacacacacacacacacacacacacacacacatacacgcgcgcgcacgcgcgcgcgcacacacacacctaggatgttttcactgtggtaggagggctgcctcctttcagtacctgtgccactgaggacttgctaccctacttgtccacattgtagccaaatttttagagcatgctttcattaaatatgttgattgattccttgaccttttttcaaagtcactcctttatgtgaatctgtaacctaaccttaaccttaaattaatttgcacagtggatttgggtcactgagttagttacctttgtgtgtatgtgtttttaacttttgtttgttttgttgtttgagatggtggtggtggtggtggtggtggtggtggtggtggtggtggttgggcgcactgtctttctcatagcctaggctgacccagtgcttgctatgtagcaacaggctagactttaaattgtggtatttaattcttctgcctccaaatgctcgaatttcaggcctgagccacactagctttgtatatttaactttatttacagaattgtcaaatactgtggagaagagataatattttttaacactaacatacctgtaactcacctgccacagctagcagttcatggctacattgtttaaattgtttgcctcctttctctgcgtgcagtataggactctctgcaactctgtacagtgagaaatagcttacaaatatagccacaaaaccactccctcatgttcagcaaatgtttcagatgatgattatttttttctttaaattcttaaaaatgtttgtcaccaggtggtggtggcgcatgcctttaatcccagcacttgggaggcagaggcaggcggatttctgagttcgaggccagcctagtcttcagagtgagttccaggacagccagggctacacagagaaaccctgtctcggaaaaaaaaaaaaaaaaaaaaaaacaaataaaaaaaagtttgtctatgtatatgaatgttttgcttacatgggcatatgtgtaccgtctggatacttggggtacctgcagaatgttaaagaaagcatttgatggagctgggaactgaactctggtcctcttcaagagcagtaagtgctcttaatcactaaaccatctctccatccctgtttcagatcattgacatgctgttacaaatgggtttcagagactactcagttgctcttttaagacaaatggaatgttttctattattgattagctaaaggaagttgtcagtgacttaccccttagcactaagttacagaaaaggattgactggattttagcttgagtaattctgacctcaagtactaaggacgaggaatgtctcaggttcttttttccccctgactttagaatatttgctcatgggtagtgagctgttcccaggaaagagagtctgagtatgagtttggaactgatttgctgtatagcctgtagacagcatggacgtaatttggcacagtagagttggtgcttctctattttgcctgctgccttggccttggcgttattcgagagagtctccactcgtcattgaaaagatttggatcacttgagattgtggggtttcagattgataatcctcaacttacaccattttttaaaatagccttcctttttgctttctgtgaggaaaagaaaaggtgtatcatggtctcttctgaggacctcagtggcctcaaactaacctggtttgctttgttaaaatgtgattttcatcctaggttttcttcagggccatgtagcttgtctatgtgtctctttgtgctcacatagccagtgtattggcagttgggggctgactgacttcctaacaggaacgtcattgctgtcactgttcctgctgtgtgactttccatagaagcatattttacgtcttggggcactgatttgtaaaggaagtcattgctttggagagcaggagcagatttcatgctgaattaaagattacgtgaaatgatgactaagtgacacccttgaaataaaaatgagctgtacagtgagccatgactgaactttcatgtactaaaaaatgttctgaggtccagattgaactctgagaatacttaattgaccacttgagccaagccatcggtgtgaaatacgattaagatggattcatgcctttagtggtagttgtaggggacactgtaatgtgacttagtcatctgtaatgtgtacttaacgtcatctaaagagtcttctgcttatagccaacctggcctgtccccagtgccttagggaccctgcttcagttcgttaccctgagtaatgccaagtgagaaggtttgttagtatccatcttctgaagaacccaggaattttctggaaactcaatttacatttcatactcattcttttttttcggttttttgagacagggtttctcagtgtagccctgactgtcctggaactcatgctgtagaccaggctggccttgaactcagaaatccacctgcctctgcctcccaagtgctgggattaaaggcatgggccaccactgcccggcactcattctttaaataatgaacagttctttgaccaagggcaatccaccaggtttgtagaatcagaagtggacataagggtctgctgatgtggatatttgcttatgtcttcaaaaattgctcttctaccaattctgtactggtaattgggaaatactggaaattgaataggagatgtgggagcataggacgataaatgagggcagtatcaaaacaaatcttgaatgacgtcttgttacttttctgttactgtggtaaaacaccatgactgaggcagtttctaaaagaaagtgtttaatctggcttctaacctcaaagggttagagtccatgatggtggagcagaggaacagctgagtgttcatagcttgattgccacccaggaggcacagtcacagactgggagtgatgtggctcttttgtaacctcaaagccagtacccggtgacataccttttccaacaaacctatacctcctaattctttttaaacaattctacgcaccggggaccaaggattcaaatacaggagtctatggggaccactcttcccattcaaaacattacattccacaacatggccactattggcttttatatcctaatacaagaagcattggatccaatacagttttaaaagtccaaagtcttctctgatactccaggcttttattcataataccctgtaaaatcaaattttaaaacagcaaattacatacttccaacagataatggcacagaatacacataaccattccaaaagcagggaaatggggcataatgaataaatattacatcaaagcaaaatagaagcctagcagagcaaactccaaatgctgtagctccgcgtctgatagccagggtctttgatgactcttcccttccaactttgctgcctacgatctgcttctctctctttggatgcttctcttctctgtatgcagctctttttgacagatatccacagctatggaatctccacatcttggagtctctagcacaatccaggcttcactttcacagtttcatgcagtgaattatcagtgacacccctggcctagggactctctttaacttcagaggaatattctacaaccccttttcttttgcatccttatgactctaaagccagatccatgtgggaaacatgaccttatttgactgccctcttgggatggagctgcctctgtgaatcacatttgcagcttcttactttcctaggctttccctttagaaagtggggtcttgccctgagggcaccccctccctttattctatttcagatcaagtctctctttgatctttcctatctcttttagcacaagcatttcctccaagtttaaattctctggtgttcttctttcaaaacccaatacattttgtatttcttcttcccccacttgatttttttccattattgagctacatcagagtgattactattaaccatatgacagagacaatattaggctgttttataatctctttcaaggaaattagtctattacttttcaatctttcttcatgcagacttaggacaagggcaaagaagaaccacattctttgccaaaatatcataagaatggtttctagccaagttgctaaaattgtttctctctaaaacatctttggctgatcctatattcatactgctctcagaacctctgtcttccaagctcctataatgatagccattagtccctgcttacagcattcaactgatttcctaaagtcccaacatcttcctcaaaaacaaacaataacaacaccaaatgaaacaagcaacaaacataactatggtcagttctgtctcagcaatagcccactctctggtaacctagttctatcttattacttttctatcattgtggtaaaatactatgaccaccatagtttataatacaaagcatttagtctgacttattggtcaggaggttagagttcatgctgatagagaaaaggaacagctgagtattcacatcttaattgccacccatgaggcaaagagacggagtgtggaggtagaaagaaagagacacactcaacctggaaatggcacgaatctcttgaaacctcaaagagcattctcaatgacataccaaggccacgcctcctgattcttcctaaatagttctacccactggagaccaagtattcaaatatatgagcttatggggaaccactctcatacatttccctataccacaaaaatcaagaggaatatctattccacatagaggttaattgtgcagaaaggtgaacctatgtaaaatatagaattggtcatgaccttatcttagcaacgtggaagagacatttatctagaagctaaaatatgagagtacagactagtcctgtgatggctatgcagtctgacaagggtaaaagggacattaatgcacagtgtgcatgcctgtgtacattgttttttcctagtcccattttactttcttgtggagacttaactatgatttaccaaataacttacgtaggtttgtagcatggattttagtatagaaaaaaatgccatattggaactttcccttattacaaataagatgataggtattttgagaacttagaaattctactctgaattcaggcagaaaatgaaatattttggattgtataaatttgttttgttatataagaaactgattaagtgtgtaaaacaataggctaatccctttctagttacagccatgttttaggttctatttcacctttgtggaaatacctttgttattctctgggatgactgttacagaagaagggattttcatttcactgtaagatatttcaacttaaaacctcttaattttattttctctcaagtcttatacaaacggcagagtctcatttgtttactgtctcatagctacagaagtgtttaatgcacgtgttgcatgttccgattattactgtttcaaacccaccgcttcttccctcctatgttccttcctcctgctctctccagcatgtcgggagtagccccattgctactcccgcctaacagggaaggaagtgaagctggagggaagaaagacaaaacacatcttctactttctttgcaccaggtactgttcttccaggctccagtgactgctcatacctttgtaactggtggaattctttaaacagttttctctggaattattaaagactggttggggatctgtactgccgtaattaacactttaaaatcatgtagattctgtccatataatattatctttaatacaatatattctgactttcaaggggagaaattaaaactacattgccaaggcaatattaattataattcatgaaagtaattgttctcgtaattatttgggaatttctttgcaaacatcctttgactttgaattctgcccattttaaatagtgataaattcacaggcttagagtgtaagatttttttaaaaaggccttgaaaaaccctttcagaggggctacatgtcaaatatcctgcatgtaaaatacttatattatgattcataacagtagcaaaattacagttataaagtagcaatgaaactaactcctggctgtggtcagttaccacagcatgagtaatgtcattgaaggatggcggcattaggaagactggggacccctggtctgtagtgtttcagattctttgagggtctgatgtggcagctattttctgataagtgaactgagatcttgattgctgtggaacaaactcctggtttgcttgctggatagcaagctgattctaccgcctctcctattgctaacttctgggtcttacagagtcaccatggcctgtgtgctcgtgcagacttatgctttggttagcagcgtgctttcaggagaaggatccctgtgctttctcagtccttgcttctcagggtccctgtggagcagttttccttctggtgttagctgctgtgctggctgagacagtgacaccacgtgagcaccacactttgtcaccattgcttttctagccttggacattaggtaccaagtaattacttactcggtgaggctaatacaaaactgtagaagagtctctggatttttgttgattttccttcaagatgctaataggtttattttgttaattacaaactgcagctagttgaatttatgctagtaaaataatatacatagttcacaataaagactaacccttgcctggctatcatgtggcaagctgttctatctagtttctagcagccttatgagacacagtaacaagtgagagctaatgcgtggatgccacaacagtcatgagggctgacttcacaacagtgaatatctcctgagctgatgtcatcacactctgtagaaagcaatggaggtatggagtgcttgcactgctgtatatgatagactttcctgcttcttcttttatttgtttctatgttcactgctttacaaaggtggactgaaggaactaaaactgaaggttactcagcagctaagagtcactggcagaattacactccacaatgcagttctcagcagaatccagtgtactcagtgctatattaaaaggtagcttccaagcaccatgttgacatgtatagcttgaagacacatgatcagccactccacatttttatgttgaatagcatgcactaaagaacacgagatgctctgtgagttcccaatgcaggttaaattgatgtcagtgttgcaggaagtattgtctgattctttgaaaattggtcaaatagatcaaatattgttatatcaggaacatcacatttttaaccagacattgacattggcatttggttacataggtatgcaagagtgcacatgcttatgtgtatattcgtgtgtgtgtgtgtgtgtgtgtgtgtatgtatgtgtgtactaatactgggtttgttggtttgtttgttttgagacaggatctcactatgtagccctgattggcctgggaggtattacagggaggctgtcctcaaacactaagaagtctgcttggctctgcctcttagagctagaattaaaggcatgtgctaccacacttggccttagtcattaatttctgaagctgaatgattttagtttgagggcttagactaacttaagtagatatttattcttaaaattttatctcccattttatgcttatttatctttaggagttccattgtttttagcctagagcactgcattctgattattatgaagggctagagtctctttattggtctaattaataattttaggaaataaatagtgaaatgattagaaaagaatctgtgaactatatattcaaccggtagaccttgtataagaaacctggaacttacatctttttcctttttagttttcagtgttctaattacaagcaagtaccttctttgcaatagttcaactgtttgaatttgtacatgtgtatatgtgtgtgtgcatgtatatatatgcacacatacaaatatgagtcaaaatttagagtactaggttaactttaatacctagtggtttgttcctccttgtctcgaaggtgcttgctgtctttgcagcagtgagactataccctttagactgtattcagctagtaacagtctcaggacattgtctacacatagtataccaatagcaaaatgaggaatggactttgagctcagatctgatctccacccaagctagtgtctgctgattattcctattgaaagcacaaggagttttacattcatggactagggtgggggaataacagttgacacctttggtgattttggaaggctggccctgttcaggtgcttctgactctggcagcgtgaggcatcagattcacatgttcaggttaggctacacagtgagctcagtgggcaggtgcgtccacattctcctcactgcatggccaattatctgtggtcttgttggcatgtctctctcaggtgtgagacctttgttctgcatgtgctctcactatgtccccacatagctagcagtctggtgctgggttttcaaagagcaaatgaggaatgaatatagctggtagcatgaagatacctccttctaacccccatctactcccttcccatggcagatagctacaatgcctggctatttctctttgttgccttttctggattgctataacctggggcttgaacaattacctaggtattttgtttcttctcctaaattcttgatgactgcatcactctgattttattcctgtaggtcctctctaattttttaattagatactttatttatttacacttcaaatggtattccctttcctggtttcccctcggcaaatcccctatcctctccctccttatgctcccacacctacccacccagttccacttcaccactctagcattcctctatactggggcatcaagtcttcacaggaactccccacccactgatgccagataaagccccttcagctccctcagtcctttccctaactcctccattgagttccctgtgctcagtttgatggttggctgggagcatccgtatctttattgttcaggatcaggcagagcctctcaggaaacagctgcatcaggctcctgtcagcaagcacttcttggcatccacaataatatctgggtttgatgtatgcatgtggaatggatccccaggtggatagtttctggacggcctttccttcagtctctgctccactctttatccctgtatttcctttagacaggagcaattctgggttaaaattttggagataggtgggtggacccatccctcaaccgggggggggggcatgcctaacctctggatatgatcttaacaggatctgtgtcccctttgtggggtatttcagctaacaccattcctgtaaggtcctgggaggctcttgctttcctggcatctgggactttctgcttgctgaccccagttcccctacacactgctgtacaaattcctgatcctctgtacatctcctctcatacctgattcttccccttttccccctctccctcttctcttcctcccaagtccctcccaccttctacttcccttgattattttgtttcccctactaagtaggactgaagcatctactctttggtcttccttcctcttgagtttcatgtggtctgtgagttatattgtgggtattccacgctctttgcttaatatccacttatcagtgagtacataccatatgtgttcttttgtgactgagatacttcactcatgatattttctagatctatccatttgcctgcgagtttcatgaattcattgtttttaatagctgagtagtgctccattgtttaaatgtaccacattttctgtatccattcctctgttgagagacatctgggttctttccagcttctggctattatatatatggctgctatgaacatagtggaacatgtgtccttattacatgttggagcatcttctgggtatatgcccaagagtggtatagctgggtcctcaggtagtactctgtccaattttctgaggaactgccatactgatttccagagtggttgtaccagcttatattcccaccagcaatggaggagcgttcctctttctccacatcctcaccatcatctgctgtcacctgagttttttatcttagccattctgactggtgtgatgtggaatctcagggttgttttgatttgcatttccctgatgactaaggatgctgaacatttctttaggtgcttctgggccattcaagtttcgtcagttgagaattctatgttccgctctattccccattttttaataagattatttggttctctggagcttaacttcttgagttctttgtatttattggatattagttgtctataagatatagaactagtaaagaccttttcccaatctattggttgccatcttgtcctattgacagtgtcctttgccttataggagatttgcaattttatgaggtcccatttgtctattgttgatcttaaagcatacgtcattggtgttctgttcagaaaaatttcccctgtgcgcaagtattagagtcttttcctcactttctcttctattagattcagtgtatctggttttatgtggagctccttgatccagttggacttgaactttgtacagggagataagaatggatcaatttgcattcttctacaagctgactgacagttgaaacagcaccatttgttgaaaatgttgtctttttccactggatggttttagcttctttgtcaaagaacaagtgaccataggtgtgtgggttcatttctgggttgtcagttctattccattgatctacttgcctgtcattgcaccaataccttgcagtttttatcacaattgttctgtaagacagcttgaggtcaggtctggtaattcccccagatgttcttttattgttgagagtagttttcgctatcctcagttttttgttattccaaatgaatttgaaaattgctctttctaactctatgaagatttgagttggaattttgatggggattgcattgagtctgtagattgttctcagcaagatggccatttttgctatattaattctgccaatcatgagcatgggagatctttccatctcctgaggtcttcttcaatttcttcttttcagagacttgaagttcttgtcctacagatctttcacttgtttggttagtcacaccaagatattttatattgtttgtgactattgtgaatggtgtcatttccctaatttcgttctcagcctgtttatactttgagtataggaaggccactgattcgtttgaggtagtattatatccagccactttgttgatatagtttatcagctgtaggagttctctggtagaatttttggggtcacttaagtatactatcatatcatctccaaatagtgatattttgacttcttccttttcaatttgtatccctttgacctccttttgttgtcgaattgctctggcgagaacttcaagtactatattgaatagatagggagattgttgaattttgtcaaatgccttttcagcctctaatgaaatgattatgtgatttttttctttgagtttgtttaggtagttgattacactgatggatttccgcatattgaaccattcccatatccctgagatgaagcctacttgattgtggtgaatgatcattttgatgtgttcttggattcagtttgcaagaattttattgaatatttttgcatcaatattcataaggaaaattgttctgaagttctctttctttgttggatctttgtgtagttttgttatcagtataactatggcttcatagaatgaattctgtagtgtttcttctgtttccattttatggaatagtttgaagagtattgttattaagtcttttaaggtcttatagaattctgcactaaacctctgtgtctgggctttttgttgttgggagacttttaatgactgcttctatttctttaggggctatgggactgtttatcaggggggttaactttggtatttgacatctgtctagaaaattgtccatttcatctagattttccagttttgttgattatagccttttgtagtaagatctaatgattttttttgaaattcctcagtttttgttgttatatatcccttttcatttctgattttgttaattttgataatgtctctgtgccctctggttagtctggctaagggtttatctatcttgttgattttctcaaaaaaacagctcctggttttgttgattctttgtatagttctttttgtttctacttggttgttttcagccccgagcttggttatggagagctgtgacacagggtaatctcagggtgcaaatgctgctcctccattcttgtgtcctgaggcctctgggcgggtccctcttgggctaagtatttgagcagaagtggtgatcttacctgtgttctcaggttttgtcagcaatcttgggagaccagctctgtccctgtgggatttgggtatagagggctgtgtgacagtgtcagctccagctgcagatctctaatttttgtatgttgtctctctgtgtctctggattttgctattgccttcattgcttttacatgccataactgctaataatttagaatggaggataaattacatactttatttctcatatgactccaaatcattgaaccttttaaaggaaaggaatgttaaagtatttaaattctatgtaaaatttgcttcatctaaaactagtagcttaaaatgctacttttattaggacacagtgagactttctcaaaaaaaaaaaaaaagaaaagaaaagaaaaaaggaaaagaaaagaaaaagaaacagtaacattcacacaaaagtcttttaattaactttattctctatctgtagttacgcagaatttataaagtgagaattagcattgagtaatttaatgtcactgtgaaagttctggggcaaatacatttcatacagtgtgaggaaagaaatgattgcatgtcatgaagcagtgggaattagcagagatggcgctgctgagtgtaaagctggaacaagaaaagtattagaatgtctgagaatgattaacaagttttattctgctcctacttttccaaagcattgatgggtaggggtgttagaactagatgagctgaagttgagcatccttcccaaagccgagtgaactcacagaggctgtctccttagccagggacatcatttcctaaagcactcaaggttggaccagagctgttagtgactcatgctaagtcacaaccgtcttctcgtttatgtgcagaattctttgtgctatttcagctgcttcgaccaaggctttcagtcattctgcttgaatttgagcatactatgcacataaaaaggctagagttgacttttctaaaatatagagggtactaaatgtcacatgaatgttgctgtgacctttccttgcctaaggaagatgattatccactgagcagctgtcaacatgatgagactgataatcccatcacagggaagggggtgatggttgggaatcatgacagatacaggttaggcaaggacaggaattctgatgtagaaatgtagctcagctagacttggcagaaagagttaatggcccgagagtcctaagggtagggagagacacagtttaagagtgtgtcacattttagtgaatgtatgaaattctattatttctaaatttttgattttcttgttaatatcttaaccccatagtgtttagaagaaaatattttgagaactaaatgtacttttcccattgtatatatttacaagacatttgcaaaagatggcgatttgaatagatggttagaattcatatttatattaatatattacaggttttgttcattctgactctaatcagccttgttacttattcatctatttatgtgtgtgtgtgtgtgtgtgtgtgtgtgtgtgtgtgttaatggagattctagagatgtcagattctctggatttagttacaggtgtctgtgaggtatcatgtgtgggtgcagaaactgaacttagatctcttgcagaaacattgaaggaaggctctttaactcccaagccatctctccagttcttttttttttaattgtcaatgcagattagaaatcatgttttagactatagttatcttgaactgatctaaaggtcaaatctatttacattgtttgtataattgctcaagatgatggggatatggactaggtatagtagtgatcttgctgagcctttcttgagttttaaaaatgagaatggaagggacagatgaggtggctcaatggttaagagcgctagtttctcttccagaggacctggtttcaatttccaggttctacatggaagctcacaactgtttgtaactccagtcctaaggaacccagcacacacatgtgtgtagacacacatttcagataaaatataaataaaaggttaaaaacattttttaaatgagaagggtatattgatattaatcaggtatgtattaggcgatccactttagagatgaagaaactgatgggtggagagatgaagtgacttgtcgaaagccagatgactagaaaagttttcttatacatactgttcttgagcagcagtgttgtggcttatagttggctggtgtaatgtatgttacagtagcttctgccaaagggagatttatgtttcaaatgtgagatccttgagaagtcccttccataacaagggtggtaggcattttccacatagggtagtttcttttactttctagatttttcatagcgttgattgattgattgattgattgattgattgtacctttcttatggacttctaaagtttgatttgatgcttctcagttattcactggggaatcactgtccttcagtgtgacaaggaatttggggctggagtgcacagagccgtgatgtcaagaatgaaggtcccaccagatggatgtcaccctttgtgtggaatctgtttgcttagcagatggtctctgtttctctcaaggagcatccacaacctgttactgtttcttttccacacctaagattacatttcttctaggaactgcttttctgggttctggttacaataccattttcctgagagttaggagaatgttcttccttcttcccttgtttcctggtgaaatctaacagtgtccaggccctggcctgattcatgtggttaatagtgcaggctcttgttcacaccctgggcccaggctgtggcctgaagctcaatttactttaaccttgaagttaaaggcaggggttgagtctcactatatggagtttgttggaaattaaactcaatattctatcttcagctctcctcagggccacacttcctttctataacaataacttacaaatactgggaaaggaagctgggaaagaacgctgcttgccctgagatgcacccgggtggctttcttattaatagttcctgtgtatgtagattgtgggaaggatgtgagttttaatagcagctgtgtaggtggagcacagcttcttggttggatgtccagctttccttctttgggagcagtgcttttctcttttggatgagatgtgccttggctggtctatgctgatgtactcacttcttttgtttggggtccaggatatggtctgttcccaggggaagcttgtggtagcctttgtggtctcctgggttgctccctgccccatggctattacatattggactcgtggtattactctagatgttcctgtttgcactgtggttcccttgagactgtgctggctgatcttatcctgttcctgtgcccacttcctcctgcttccagcagtaacaacttttagtctagaatgaggaatggagcaaggacaacttgtcgtttaatcatgttctctttgtccaaagggaacagtgttagacttctattaaaataaaacttgttctcttctaagtagtctccaagggaacagtgtgctaggtaggccggaggcaagctggtgtaggtggctgaaggacttgagaggtgggctgtagaccctcttttctgcccagcatcggagggtcatagtgagtactcagtgtggttgtttcagtgaacaaggaaaagcgttctgtccctacaagctctagatcttcttggtttacatcaggaatttggctgtctttggggttttcttttttaatggtgtaaattcaagggaagctgagaatgctgaagtgccaactcagaccttctgtatcagagcctttgtaaacagcatctttctgcttcatatgtacagtgtaatttatcttgaattcaagtatgacctcagcagaatgttttttgtaaatttacttctaataaatatgcataaatttgggaattagtgaatataaactatgagtaattctattttgtagcagcagcaataaaaataatagcagcatttattgatggtttttctgagctatgaaggtaggactaggtgccattttaatactgctacatagacatgaagccgagtctcagaagagatcaatgatctgtctgtctatctcagcgcagaggagaggctgtggtgcttagatgagaatctgtgccgtctgggcctagagccacattcccaggactctgctctgcctcttctgggttaggggaaagctggaattcggtaacagtacagtacatcagggtgatcaaggataaagagtaaaatcttccttccttcatttattctctctctctctctctctttttttttttttttttttttttttgcaaagtaaaactaagttaggcaaaggcttagaactctgatgttacaacatctgctatcagacagaaccaagatatttgaagtgggctaaatctcttcactttcattataaatggggcttgtaattcctgaagaactgagcttacccagagcactttgtttctgcagcctgcatctgggtttgtagcgctgggatcctggtcttggtagggattatttaacgaggagggcagtggatatctggataatcatttagatagactttttgttttgtgcgaagcatctacatgaggcaaagcacaatcaatgtgtagttatctcactgaaatcagcacacaccacatctgtcttcctgtctagtgcatggttgtgtatttcctttaaactcttgtgtcagtttgttcataatcctcttacttgtttttgttttgtattgttttcttgattaaaaccacctgtaggagagactagtgacatcagtaacctaaaaggtcattgcgttcttcggagccctgtgctaggttgctttaggcctgctctcgggcagtttttacagtagcaggctgttttgtgccaagtgtatataggcttcatctctttgtattaggactttcatgctgttcctgagttcccaaaagggaatgtctcatttctatgtgtaaacaattaattccatgtattcttttcttttttctccaggttgcatcacagcgtataagctcagtagacctctcctgttgtagccttgaacatctgcctgccaacctcttttacagccaagaccttactcatctcaacttaaaacagaacttcctaaggcaaacccccaccctcccagctgccagaggacttggtgaactgcaaaggtgagcctgcacaagcgctagaatctcttggaagggacagggaaaccagaccatttgggaatggtatcttcactattttgacagggatagtgtatatacatttttctcttcagaaggcaatataacatggctttgctttatagtgagaacagtatcagctagcattccaaaaattttctctaaggtttcttgcctttaaaattatggcctgtagttatccattgggtagatttacataagagcagttcttttaaaagtgaacttcatcccctacattatctgcaaagagactgtgaaaatttcatggtatttagtgtgtttcttctaagctcaagggtctattcaaaataaattacttgatttgaaatttatggatcagtttttcctcatgaaaacactcatctttgaaccaagacataagaaccaaggtttaaggccaaaactctatggcatctagatgtcagtatgttggacttgagtcatatgcatcagctcggagaatctgcctcattatgtctaggagtatctctcaagaggatctgagaggtcgtcttgttccttcctttcccactttgaggcagtgaccaagcatgattctggggatatgcagccttttgtgactctgcatgtagagactgtactgaggaagaggtagttatgttcaaggagcagagagtagttcatcccttaagtggccaatgtgcttagaaagctatgctgatcagccattgggattctatgtctgatttttaatacccagaaagaagaatccaactacatcttactgttaataagatagtgtttttaacagttaacttcaaagttagagtgtctgtttctcagtgtcattgcagcatttctgactatttgtgtgcaaccgtactgtcatcttaaatagtagttttctgcagatgtccactcactctggctcttgtaatctttccaccttgtattctttgatgagccttgagcctcagtgcaaggactgtgatgtagattacccatttatagctgactgctctttttctctgcatgttgaccagagttggtctctgtgttaacatcatccactacaaaaaaaaacaaacaaaaaactgctgagttatcttgtgtgtgtagtgataagaacttagggagcagttaattactatgtccatttagtactatgtccaatagtacccttttatttatttatttatttatttatttatttatttattgacaacacaagggaatcatacgcctgaaagcaacctgcgaacatgactttcccaaagccaatatagccatggcttgttttgctctcatcttctccaagatcgctggctagcttaatcatgttgctcttatttaaactatacattataatcttgtgaaatttgtttcttctgggatgtctaatgatttcaaactaaactcccaatgactcaggaattccaggcaactcctaggcctacaaaaccaaaacctcctcccacaataggtaagataggcagagtcttgtggttcctcatctacatgggcataattatagaaggtgattgattgtcacgtttttgtacccaggaaagacttttgggactatagttctccaggaaattgtggcaggagagtcagaaactggggagaacgttctagaaattaccacataaaaggtaacagcaacagaaagagctgaatccacctccagtctctccctgtgcttcattgagcctggagatattctgaaaagtacacacacagtcttgagagagtcaggtactgtgttgactcataaaaaaagttccttcctcttggaggcaggccacagaggagatagggcacctcctagtccttctggctctccctgtcctgtaactcccatgggtctctatacagttcattgtgcattgcacatgggaaccatgcctacttccagacttgatccacacctgtaggaactgaagccagtagtatttggctactaccaaaagatttcaatttattcatgtcattttgttatttttttcagtgtttattattactagacatttatattataagtgacatgaagttcacatatgattattaatgaattattcctactgtaaataacactgaaaacatgcacacataacaagccaagtgtaacatcagatatctggtcaacatttctctcagtagtgatttgttattgatgtttgttgctgttctttgagtgtgattatttactccctgacagttttacagaatactaggaaatagtttgtaaaggactttttttaaagcatagaagtagtactataacattaacttttgtgcatttggttacctttaatttttgtcttagagacctacagtataactctctttcctaaggagacacttgacctcatgacctttgttacttactttttgttgtgtttatccactttgggctcagattcctagaaggtacaaatcaggtcccccagaaatggttaccattgtgagggagaccattaaatacattgtgagtgagcacatgagagaatgtagtgggacctgcttttagtcaccacttcttgttattcatacggacttctttgtaacaggcttttgcggcaacttgtagaaagaagtgaaactggtaattcgtcatttctctttggttgaaggtttgatgaaaaaaaaaaaaagaaaaacaaaactacataatgagaccactcaggaaacatgacacggagattcataaccgagaatcggtagtaggaaaaagagaaaacaagtttttcatttaaaaaaaatgaacagcgtgatttttttcattttattttttgttttgtgtacattggtgttttgcctgcatgcgtatctgtgtgaggatattggatcctctggaactagagttacatacagttgtaagcagccatgtgggtgttgggaattgaaccctggtcctcttgaagagtacccagtggtactctaaacaactgagccatctctccagcccccataatgttttttttttctaaaggagggggaggggagagaccaaagcaaagcaaaacccactgccaggctctgaaatacagttcactctcttgtcactccctttaccactcccaggccagcctggcatctgtcctgcctgtccttgaaagcatatttccaaagatgtcttgtagagtttggttatgtccaattccatgtgctcatttcctcctttgatttataaacattgcttatgcttccttgcttgctatacatctgtaatgaacattagaaaatttctaaattgactctgtgtgtaaatttcttgaccatagaggtggaatgtctctgcttttattctgtttccccttcatatttagcctagagctgaatttagggtggagaaggacagacacaaggatggtgtgcttcagtccagttcttggtttctctgtcaccaaagagaacagaaggtcatcctaagacatatagaggaaggtttgcaaagagctttgagcagtggcattcatatatggctcttaagggataggtcgtaagtctcgtaagatgccttttggttgatcatatgatgtgatgcctgaagatcaactttagtgaaccttaggtgtgtatgttagagtgggtggggtataaataagcttggtatcacctaaaacaaggtgaatgtttcttttgggtggaaggatgaatttaagacttggaagacttagagggaagcagtgaactgagttaccagtagatgtgaaattggcattcactgacaaggagagagtgaggaatgtgctgggagagcccgtaaagcttcgtgcacaatcacggtgcactatgacagtaaacgtggagagatgagaacaaactcccatttctgtctgcagtaaagatccctttctttaaaagtcttcaatctgtattttggtccacatggaatgggaaacacatgaccctatttcctgccttgtctttcgggcacttttcacattccagtaataggaagttatcaaattatttatgcttgccacactttaacattcttatgctttgtttaagaagcaatacaatttttattttatgagtaatttctggaaactcattttagtggtgagagtgctcttagtaaactggaacaagaagtggcctggtgatgtttttgcagctcatctgccagacaacctatgcagtacttaggacactccagccttgtgggatgcactcttatatgtgaagataggtgataaagattggagataatcacggaagacaggggttgtccatgtaaaggataaaggtagccggtgcaaagtgctgtgggtgaaactgagatttctagcactgggtttgaggtttgccagatgattcaggaatttcacagaatgtatggactccctctccagttagctgttagcagactgcaggtttttgtatacctgagctttgcagtgcagtgggaatcctnnnnnnnnnnnnnnnnnnnnnnnnnnnnnnnnnnnnnnnnnnnnnnnnnnnnnnnnnnnnnnnnnnnnnnnnnnnnnnnnnnnnnnnnnnnnnnnnnnnnnnnnnnnnnnnnnnnnnnnnnnnnnnnnnnnnnnnnnnnnnnnnnnnnnnnnnnnnnnnnnnnnnnnnnnnnnnnnnnnnnnnnnnnnnnnnnnnnnnnnnnnnnnnnnnnnnnnnnnnnnnnnnnnnnnnnnnnnnnnnnnnnnnnnnnnnnnnnnnnnnnnnnnnnnnnnnnnnnnnnnnnnnnnnnnnnnnnnnnnnnnnnnnnnnnnnnnnnnnnnnnnnnnnnnnnnnnnnnnnnnnnnnnnnnnnnnnnnnnnnnnnnnnnnnnnnnnnnnnnnnnnnnnnnnnnnnnnnnnnnnnnnnnnnnnnnnnnnnnnnnnnnnnnnnnnnnnnnnnnnnnnnnnnnnnnnnnnnnnnnnnnnnnnnnnnnnnnnnnnnnnnnnnnnnnnnnnnnnnnnnnnnnnnnnnnnnnnnnnnnnnnnnnnnnnnnnnnnnnnnnnnnnnnnnnnnnnnnnnnnnnnnnnnnnnnnnnnnnnnnnnnnnnnnnnnnnnnnnnnnnnnnnnnnnnnnnnnnnnnnnnnnnnnnnnnnnnnnnnnnnnnnnnnnnnnnnnnnnnnnnnnnnnnnnnnnnnnnnnnnnnnnnnnnnnnnnnnnnnnnnnnnnnnnnnnnnnnnnnnnnnnnnnnnnnnnnnnnnnnnnnnnnnnnnnnnnnnnnnnnnnnnnnnnnnnnnnnnnnnnnnnnnnnnnnnnnnnnnnnnnnnnnnnnnnnnnnnnnnnnnnnnnnnnnnnnnnnnnnnnnnnnnnnnnnnnnnnnnnnnnnnnnnnnnnnnnnnnnnnnnnnnnnnnnnnnnnnnnnnnnnnnnnnnnnnnnnnnnnnnnnnnnnnnnnnnnnnnnnnnnnnnnnnnnnnnnnnnnnnnnnnnnnnnnnnnnnnnnnnnnnnnnnnnnnnnnnnnnnnnnnnnnnnnnnnnnnnnnnnnnnnnnnnnnnnnnnnnnnnnnnnnnnnnnnnnnnnnnnnnnnnnnnnnnnnnnnnnnnnnnnnnnnnnnnnnnnnnnnnnnnnnnnnnnnnnnnnnnnnnnnnacaatttttattttatgagtaatttctggcaaactcattttaggggtgagagtgctcttagtaaactggaacaagaagtggcctggtgatgtttttgcagctcatctgccagacaacctatgcagtacttaggatactccagccttgtgggatgcactcttatatgtgaagataggtgataaagattggagataatcacggaagacaggggttgtccatgtaaaggataaaggtagccggtgcaaagtgctgtgggtgaaactgagatttctagcactgggtttgaggtttgccagatgattcaggaatttcacagaatgtatggactccctctccagttagctgttagcagactgcaggtttttgtatacctgagctttgcagtgcagtgggaatcctcttggggcactttctatttcagtggcttcccattttccccctgagctctggatcaaaggaaaatcttgagatggcttagggcttagactccctttcggctttctctacttcctgagctcttacaatcatggcctgtttgggtttttctcagacagcactttctaaaaaaggaactcaaaggcaaaccaaagatttttttttaaagtaatttttttattaggtattttcctcatttacattttcaatgctatcccaaaggtccccccatacccaccccccctttttggcgttcccctgtactggggcatataaagtttgcaagtccaatgggcctctctttgcagtgatggccgactaggccatcttttgatacatatgcagctagagtcaagagctccggggtactggttagttcatattgttgttccacctatagggttgcagttcccattagctccttgggtaatttctctagctcctccattgggggccgtgtgacccatccaatacctgactgtgatcatccacttctgtgtttgctaggccccggcatagtctcacaagagacagctatatctgggtcctttcagcaaaatacttgctagtgtatgcaatggtgtcagcatttggaagctgattatggggtgnnnnnnnnnnnnnnnnnnnntcacggaagacaggggttgtccatgtaaaggataaaggtagccggtgcaaagtgctgtgggtgaaactgagatttctagcactgggtttgaggtttgccagatgattcaggaatttcacagaatgtatggactccctctccagttagctgttagcagactgcaggtttttgtatacctgagctttgcagtgcagtgggaatcctcttggggcactttctatttcagtggcttcccattttccccctgagctctggatcaaaggaaaaccttgagatggcttagggcttagactccctttcagctttctctacttcctgagctctgacaatcatggcctgtttgggtttttctcagacagcactttctaaaaaggaactcaaaggcaaaccaaagatttttttttaagtaatttttttaaattaggtattttcctcgtttacattttcaatgctatcccaaaggtcccccatacccactcccccctttttggcgttcccctgtactggggcatataaagtttgcaagtccaatgggcctctctttgcagtgatggccgactaggccatcttttgatacatatgcagctagagtcaagagctccggggtactggttagttcatattgttgttccacctatagggttgcagttcccactagctccttgggtaatttctctagctcctccattgggggccgtgtgacccatccaatagctgactgtgatcatccacttctgtgtttgctaggccccggcatagtctcacaagagacagctatatctgggtcctttcagcaaaatcttgctagtgtatgcaatggtgtcagcatttggaagctgattatggggtggatccctgcatatggcaatcactagatggtccatcctttcgtcacagctccaaattttgtctctgtaactccttccatgggtgttttgttcccatttctaagagagggtaaagtgtccacactttggtcttcgttcttcttgaatttcatgcgtttggcaagttgtatcttatatccttgggtatcctaatttattannnnnnnnnnnnnnnnnnnnnnnnnnnnnnnnnnnnnnnnnnnnnnnnnnnnnnnnnnnnnnnnnnnnnnnnnnnnnnnnnnnnnnnnnnnnnnnnnnnnnnnnnnnnnnnnnnnnnnnnnnnnnnnnnnnnnnnnnnnnnnnnnnnnnnnnnnnnnnnnnnnnnnnnnnnnnnnnnnnnnnnnnnnnnnnnnnnnnnnnnnnnnnnnnnnnnnnnnnnnnnnnnnnnnnnnnnnnnnnnnnnnnnnnnnnnnnnnnnnnnnnnnnnnnnnnnnnnnnnnnnnnnnnnnnnnnnnnnnnnnnnnnnnnnnnnnnnnnnnnnnnnnnnnnnnnnnnnnnnnnnnnnnnnnnnnnnnnnnnnnnnnnnnnnnnnnnnnnnnnnnnnnnnnnnnnnnnnnnnnnnnnnnnnnnnnnnnnnnnnnnnnnnnnnnnnnnnnnnnnnnnnnnnnnnnnnnnnnnnnnnnnnnnnnnnnnnnnnnnnnnnnnnnnnnnnnnnnnnnnnnnnnnnnnnnnnnnnnnnnnnnnnnnnnnnnnnnnnnnnnnnnnnnnnnnnnnnnnnnnnnnnnnnnnnnnnnnnnnnnnnnnnnnnnnnnnnnnnnnnnnnnnnnnnnnnnnnnnnnnnnnnnnnnnnnnnnnnnnnnnnnnnnnnnnnnnnnnnnnnnnnnnnnnnnnnnnnnnnnnnnnnnnnnnnnnnnnnnnnnnnnnnnnnnnnnnnnnnnnnnnnnnnnnnnnnnnnnnnnnnnnnnnnnnnnnnnnnnnnnnnnnnnnnnnnnnnnnnnnnnnnnnnnnnnnnnnnnnnnnnnnnnnnnnnnnnnnnnnnnnnnnnnnnnnnnnnnnnnnnnnnnnnnnnnnnnnnnnnnnnnnnnnnnnnnnnnnnnnnnnnnnnnnnnnnnnnnnnnnnnnnnnnnnnnnnnnnnnnnnnnnnnnnnnnnnnnnnnnnnnnnnnnnnnnnnnnnnnnnnnnnnnnnnnnnnnnnnnnnnnnnnnnnnnnnnnnnnnnnnnnnnnnnnnnnnnnnnnnnnnnnnnnnnnnnnnnnnnnnnnnnnnnnnnnnnnnnnnnnnnnnnnnnnnnnnnnnnnnnnnnnnnnnnnnnnnnnnnnnnnnnnnnnnnnnnnnnnnnnnnnnnnnnnnnnnnnnnnnnnnnnnnnnnnnnnnnnnnnnnnnnnnnnnnnnnnnnnnnnnnnnnnnnnnnnnnnnnnnnnnnnnnnnnnnnnnnnnnnnnnnnnnnnnnnnnnnnnnnnnnnnnnnnnnnnnnnnnnnnnnnnnnnnnnnnnnnnnnnnnnnnnnnnnnnnnnnnnnnnnnnnnnnnnnnnnnnnnnnnnnnnnnnnnnnnnnnnnnnnnnnnnnnnnnnnnnnnnnnnnnnnnnnnnnnnnnnnnnnnnnnnnnnnnnnnnnnnnnnnnnnnnnnnnnnnnnnnnnnnnnnnnnnnnnnnnnnnnnnnnnnnnnnnnnnnnnnnnnnnnnnnnnnnnnnnnnnnnnnnnnnnnnnnnnnnnnnnnnnnnnnnnnnnnnnnnnnnnnnnnnnnnnnnnnnnnnnnnnnnnnnnnnnnnnnnnnnnnnnnnnnnnnnnnnnnnnnnnnnnnnnnnnnnnnnnnnnnnnnnnnnnnnnnnnnnnnnnnnnnnnnnnnnnnnnnnnnnnnnnnnnnnnnnnnnnnnnnnnnnnnnnnnnnnnnnnnnnnnnnnnnnnnnnnnnnnnnnnnnnnnnnnnnnnnnnnnnnnnnnnnnnnnnnnnnnnnnnnnnnnnnnnnnnnnnnnnnnnnnnnnnnnnnnnnnnnnnnnnnnnnnnnnnnnnnnnnnnnnnnnnnnnnnnnnnnnnnnnnnnnnnnnnnnnnnnnnnnnnnnnnnnnnnnnnnnnnnnnnnnnnnnnnnnnnnnnnnnnnnnnnnnnnnnnnnnnnnnnnnnnnnnnnnnnnnnnnnnnnnnnnnnnnnnnnnnnnnnnnnnnnnnnnnnnnnnnnnnnnnnnnnnnnnnnnnnnnnnnnnnnnnnnnnnnnnnnnnnnnnnnnnnnnnnnnnnnnnnnnnnnnnnnnnnnnnnnnnnnnnnnnnnnnnnnnnnnnnnnnnnnnnnnnnnnnnnnnnnnnnnnnnnnnnnnnnnnnnnnnnnnnnnnnnnnnnnnnnnnnnnnnnnnnnnnnnnnnnnnnnnnnnnnnnnnnnnnnnnnnnnnnnnnnnnnnnnnnnnnnnnnnnnnnnnnnnnnnnnnnnnnnnnnnnnnnnnnnnnnnnnnnnnnnnnnnnnnnnnnnnnnnnnnnnnnnnnnnnnnnnnnnnnnnnnnnnnnnnnnnnnnnnnnnnnnnnnnnnnnnnnnnnnnnnnnnnnnnnnnnnnnnnnnnnnnnnnnnnnnnnnnnnnnnnnnnnnnnnnnnnnnnnnnnnnnnnnnnnnnnnnnnnnnnnnnnnnnnnnnnnnnnnnnnnnnnnnnnnnnnnnnnnnnnnnnnnnnnnnnnnnnnnnnnnnnnnnnnnnnnnnnnnnnnnnnnnnnnnnnnnnnnnnnnnnnnnnnnnnnnnnnnnnnnnnnnnnnnnnnnnnnnnnnnnnnnnnnnnnnnnnnnnnnnnnnnnnnnnnnnnnnnnnnnnnnnnnnnnnnnnnnnnnnnnnnnnnnnnnnnnnnnnnnnnnnnnnnnnnnnnnnnnnnnnnnnnnnnnnnnnnnnnnnnnnnnnnnnnnnnnnnnnnnnnnnnnnnnnnnnnnnnnnnnnnnnnnnnnnnnnnnnnnnnnnnnnnnnnnnnnnnnnnnnnnnnnnnnnnnnnnnnnnnnnnnnnnnnnnnnnnnnnnnnnnnnnnnnnnnnnnnnnnnnnnnnnnnnnnnnnnnnnnnnnnnnnnnnnnnnnnnnnnnnnnnnnnnnnnnnnnnnnnnnnnnnnnnnnnnnnnnnnnnnnnnnnnnnnnnnnnnnnnnnnnnnnnnnnnnnnnnnnnnnnnnnnnnnnnnnnnnnnnnnnnnnnnnnnnnnnnnnnnnnnnnnnnnnnnnnnnnnnnnnnnnnnnnnnnnnnnnnnnnnnnnnnnnnnnnnnnnnnnnnnnnnnnnnnnnnnnnnnnnnnnnnnnnnnnnnnnnnnnnnnnnnnnnnnnnnnnnnnnnnnnnnnnnnnnnnnnnnnnnnnnnnnnnnnnnnnnnnnnnnnnnnnnnnnnnnnnnnnnnnnnnnnnnnnnnnnnnnnnnnnnnnnnnnnnnnnnnnnnnnnnnnnnnnnnnnnnnnnnnnnnnnnnnnnnnnnnnnnnnnnnnnnnnnnnnnnnnnnnnnnnnnnnnnnnnnnnnnnnnnnnnnnnnnnnnnnnnnnnnnnnnnnnnnnnnnnnnnnnnnnnnnnnnnnnnnnnnnnnnnnnnnnnnnnnnnnnnnnnnnnnnnnnnnnnnnnnnnnnnnnnnnnnnnnnnnnnnnnnnnnnnnnnnnnnnnnnnnnnnnnnnnnnnnnnnnnnnnnnnnnnnnnnnnnnnnnnnnnnnnnnnnnnnnnnnnnnnnnnnnnnnnnnnnnnnnnnnnnnnnnnnnnnnnnnnnnnnnnnnnnnnnnnnnnnnnnnnnnnnnnnnnnnnnnnnnnnnnnnnnnnnnnnnnnnnnnnnnnnnnnnnnnnnnnnnnnnnnnnnnnnnnnnnnnnnnnnnnnnnnnnnnnnnnnnnnnnnnnnnnnnnnnnnnnnnnnnnnnnnnnnnnnnnnnnnnnnnnnnnnnnnnnnnnnnnnnnnnnnnnnnnnnnnnnnnnnnnnnnnnnnnnnnnnnnnnnnnnnnnnnnnnnnnnnnnnnnnnnnnnnnnnnnnnnnnnnnnnnnnnnnnnnnnnnnnnnnnnnnnnnnnnnnnnnnnnnnnnnnnnnnnnnnnnnnnnnnnnnnnnnnnnnnnnnnnnnnnnnnnnnnnnnnnnnnnnnnnnnnnnnnnnnnnnnnnnnnnnnnnnnnnnnnnnnnnnnnnnnnnnnnnnnnnnnnnnnnnnnnnnnnnnnnnnnnnnnnnnnnnnnnnnnnnnnnnnnnnnnnnnnnnnnnnnnnnnnnnnnnnnnnnnnnnnnnnnnnnnnnnnnnnnnnnnnnnnnnnnnnnnnnnnnnnnnnnnnnnnnnnnnnnnnnnnnnnnnnnnnnnnnnnnnnnnnnnnnnnnnnnnnnnnnnnnnnnnnnnnnnnnnnnnnnnnnnnnnnnnnnnnnnnnnnnnnnnnnnnnnnnnnnnnnnnnnnnnnnnnnnnnnnnnnnnnnnnnnnnnnnnnnnnnnnnnnnnnnnnnnnnnnnnnnnnnnnnnnnnnnnnnnnnnnnnnnnnnnnnnnnnnnnnnnnnnnnnnnnnnnnnnnnnnnnnnnnnnnnnnnnnnnnnnnnnnnnnnnnnnnnnnnnnnnnnnnnnnnnnnnnnnnnnnnnnnnnnnnnnnnnnnnnnnnnnnnnnnnnnnnnnnnnnnnnnnnnnnnnnnnnnnnnnnnnnnnnnnnnnnnnnnnnnnnnnnnnnnnnnnnnnnnnnnnnnnnnnnnnnnnnnnnnnnnnnnnnnnnnnnnnnnnnnnnnnnnnnnnnnnnnnnnnnnnnnnnnnnnnnnnnnnnnnnnnnnnnnnnnnnnnnnnnnnnnnnnnnnnnnnnnnnnnnnnnnnnnnnnnnnnnnnnnnnnnnnnnnnnnnnnnnnnnnnnnnnnnnnnnnnnnnnnnnnnnnnnnnnnnnnnnnnnnnnnnnnnnnnnnnnnnnnnnnnnnnnnnnnnnnnnnnnnnnnnnnnnnnnnnnnnnnnnnnnnnnnnnnnnnnnnnnnnnnnnnnnnnnnnnnnnnnnnnnnnnnnnnnnnnnnnnnnnnnnnnnnnnnnnnnnnnnnnnnnnnnnnnnnnnnnnnnnnnnnnnnnnnnnnnnnnnnnnnnnnnnnnnnnnnnnnnnnnnnnnnnnnnnnnnnnnnnnnnnnnnnnnnnnnnnnnnnnnnnnnnnnnnnnnnnnnnnnnnnnnnnnnnnnnnnnnnnnnnnnnnnnnnnnnnnnnnnnnnnnnnnnnnnnnnnnnnnnnnnnnnnnnnnnnnnnnnnnnnnnnnnnnnnnnnnnnnnnnnnnnnnnnnnnnnnnnnnnnnnnnnnnnnnnnnnnnnnnnnnnnnnnnnnnnnnnnnnnnnnnnnnnnnnnnnnnnnnnnnnnnnnnnnnnnnnnnnnnnnnnnnnnnnnnnnnnnnnnnnnnnnnnnnnnnnnnnnnnnnnnnnnnnnnnnnnnnnnnnnnnnnnnnnnnnnnnnnnnnnnnnnnnnnnnnnnnnnnnnnnnnnnnnnnnnnnnnnnnnnnnnnnnnnnnnnnnnnnnnnnnnnnnnnnnnnnnnnnnnnnnnnnnnnnnnnnnnnnnnnnnnnnnnnnnnnnnnnnnnnnnnnnnnnnnnnnnnnnnnnnnnnnnnnnnnnnnnnnnnnnnnnnnnnnnnnnnnnnnnnnnnnnnnnnnnnnnnnnnnnnnnnnnnnnnnnnnnnnnnnnnnnnnnnnnnnnnnnnnnnnnnnnnnnnnnnnnnnnnnnnnnnnnnnnnnnnnnnnnnnnnnnnnnnnnnnnnnnnnnnnnnnnnnnnnnnnnnnnnnnnnnnnnnnnnnnnnnnnnnnnnnnnnnnnnnnnnnnnnnnnnnnnnnnnnnnnnnnnnnnnnnnnnnnnnnnnnnnnnnnnnnnnnnnnnnnnnnnnnnnnnnnnnnnnnnnnnnnnnnnnnnnnnnnnnnnnnnnnnnnnnnnnnnnnnnnnnnnnnnnnnnnnnnnnnnnnnnnnnnnnnnnnnnnnnnnnnnnnnnnnnnnnnnnnnnnnnnnnnnnnnnnnnnnnnnnnnnnnnnnnnnnnnnnnnnnnnnnnnnnnnnnnnnnnnnnnnnnnnnnnnnnnnnnnnnnnnnnnnnnnnnnnnnnnnnnnnnnnnnnnnnnnnnnnntagcaggcaggcagccaggcaggcaggcaggcaggcagacacgtatattcgacacacgtatattggtctgtctgacactgtgtagttaagctacatttgtcaggactcctgtagagagaaatgcaccagaaaacttctggtgatgtggtgtagtttcttgctccttctacagacttaggttgattgacagaatgatgtcagctgagacagatgcaggtgctgaggcaagtcccatagaggacgagcgatgtttagaaagactatacaagggcttgacaaacattgatggagggtaagcttggtttatttatagagctacctgtgtaaggctgtgggtcacccatttttgctgatctttgaattgctaggaggcacagctgagaacttttcctggtatcccttcaggatcctcctgttaacttggagcaaggctgaggcctggctgtttgtgttaggtggtgccacctctggtgatttgctatttcaactccactgaactggattgttggtgtatctgggaagtgtttgtgagtggatagagctgccgctgctaacctgtgaactgaactgtcgatttccagacaatacagatgggagttgctctaaagtgcctttctaaacaggtccgtcccccaccccatactttctttcccactacctctggtgggtggtgagcgaatgggcagcttaaagcatttaagagccatcattgaaaagtaaggtttgaaaacaattagagttacagctacccccacttccttcatccaggacacacacctaatcttgcccaaacagttctgccagcattcaagtatccaagtatccaagcagcctgcaggggccattctgattcacatcaccatggacacacatgtattcactcactgtaataagagttcttttttaacttaggtttttttaattgaatttttatcttttaaacaatcaggcttttgtctattattaaattataattgttaaaatcattaaaaatactttttaactaatatagactctttaaggttttggttccctcctgtttattaaataattataatatgatatctaaaacttgagtgaatataatggaattgaaatactagtttgaattatggtttatttggccaaatatccatgtttgaattttttttctttcaaatcagctggttatattttacaactgcttttgtatatatatagtgtttatctggcattttgagctgaaagtcatttttataaagatttactttatttttattttattttattcatttatttatgttactttatttttcttcatgttcctgtgctagaatgaagagggtttatggagtcctggagtaaggttgcaagctacctgtcgtgggttattggaacctaactagtcctctgcaagaatgatactcttacagactaggacatccaaccctgcagcttaccattttatactctggtttgtgtgtgtgtgtgtgtgtgtgtgttttgttttgttttttaacaggatattgtgatttctagtctttttctacaatattgtggtagtacccgactctcaacttttctctcttttaagtgagcaaaaactcatttgatctctgtctcccagatcttgctcagtgcctctgcttacccattaccgttaaagtaccagacggatatgtgttctatgtggacactcctgtctttttctaacaggagttttgactctacagtgctgggatctgttttctgcatatacagaaaactaacttgaacaaatctaagggttagaaatctaagggttagaaatctaaggggtattattaggtggggagtttggggatcttgtttttttttcttgttttttttttttttttattcctaatatggaaaagatttccccacattaaattactttaaattcattggtatctgcaaacaggcgaaataattttagtgatatactttgtttagtccaatataccaaaagtatcacagagtccttttatttctactatgtcttttaaatctattccttaattaaaagtctgaattttgaaatacacagaaatctgaaactttttgagtattgttttgatgcccccaaatattttggaatgtgggatcatgaatgtccaagtagtggtccatactaactaaatctaaacagcacctaaatctataacactcatggcttcaattattttggatgagagattctaacctagtatgtgttttatatttggagaatccctcactttggactccctccttttcaactgtttcatatctgcctaccgctagtgtcatagtagccagcctagctatatggcaagtaagcccctatcctcttctttagaggctgcttggttctaggattaaggaccattgtcattacctaagctattggttctcgacctttctaaagctaaagtacagttccttgtgttgtggtgacccccagccataaaattatatctattgctacttcatatctgtaattttactactgagcagtgattcagttcctaaaaccatcagaaatatgtgttttctggtggtcttgacctatgatgtacagggtaggttgagaacaactgatcctagtcctctagtgctttgtcactgagttgattcagaaaataattgcacttccttttctttatactgtggatagaaatcactttaatacaagtgaatgaggaattcttactaagagccccccttcccattgagcatgcacctgttttgtttatactcagtggtagagttctcttaaatctgtttgcataagtgaggttcaactttcttactgcattattgacttctcagagagccaggtcttctgtttcccccttgggtacttcctgactttgaaatcctgttctctttctggaaatctatatgttgtattatcttgatccattttctttctagaataatgagtttaataatgtgcagactttcaagttgtaccttgttcttagcaaatatgaaaagcatatagaaagaaggccactgttttggttgaatgggaacaatggtttcatctgcagtgacagggagagcatctgaggggacactgttatatttgagggggagaaggaatagaacatgtaccaccaaatgatgattgttttttaagcctgagtatgtcccatgcagtacttgggacattcttaatgagaaaaaattaattgtaagtcatttttaatgctgttctgtagcttctctgataaccttatttcgggactcccttgccctttccaaactgaaaaacatcagtaaccttccttcatgtgagctccatatatacaaagcaacataatgtctagaaaatactcacacatttaataaaaaccattttcttgcagtacaaatattaagatgattgtcattattttctagtttagcaagtcttcctatctgtctggattcttggtgcattcaatcagatgtgctttcaaaggagatgcatactgaaaaatttgttaaatactgaaagcacaagtggcacaaagcaagtggaaggaatccttatattgtaaaaatagctctgaccttgggatttaatgcgagggtcttagaaacttctttggaggttcccaaaacatctcttgcaaaccactgctctgagagtagcagcgcctgttaccttatcttgtatagagatggtatagctaagcagaataaagaaaaagaagtctctttaaagatctaatggaccaatgtataatattaaaaacaactaaaaaatagaaattcagttaaacaataattatttgccttgtttcaatttaagttactaatagatctatattcatgcatccagtaagatagctgttattaagaatcatgctaacactttgaccttgttcagtaggtatactatcaagttgtgtatgctgaataaaattttatatttcttgtggactacagcttattattttatcataaattttagcaagatcatgtgatcatctgtctgctcttggcagagtgtaaagtgccagctattaggctgtgcagtctttgcacgaattaagtgtttctcatctcatatgagttgatgtccagagtgtaaatgttgagtatacagagaggtcaatgttaaagaaagctctggcagttccctgaatgacagagaagatgaaaggcccctcccaaagctgggcaggtggaaggatttatttagtttttttttttgattaggtattttctccatttacatttcaaatgctactccaaaagtcccccaaaccctccccccactaccctctcctactcccacttcttggccctggcgttctcctgtactgagacatataaagtttgcaagaccaatgggactctcttcccaatgatggccgactaggccaacttctgatacatatgcagctagagacacgagctcagggggtactggttagttcatattgttgttccacctatagggttgcagatccctttagctccttgggtactttctctagctcctccattgggggccctgtgactgtgagcatccatttctgtgtttgccaggccccagcatacctcacaagagacagctatatcaggatcctttcagcaaaatcttgctggtgtgtgcaatggtgtcagcttttggaggctgattatgggatggatccccgggtatggcagtctctagatggtccattctttcgtctcagctccaaactttgtctctgtaactccttccatggggtgttttgttacccaattctaaggaggggcaaagtgtccacactttggtcttcgttcttcttgagtttcatgtgttttgcaaattgtatcttgtatcttggatattctaagtttctgggctaatatccacttatcagtgagtatatatcatgtgagttgttttgtgactgtgttacctcactcaggatgatgccctccaggtccatccatttgcctaggaatttcataaattcattctttttaatagctgagtagtactccattgtgtaaatgtaccacattttctgtatccattcctctgttgaggggcatctgggttctttccagcttctggccattacagataaggctgctatgaacatagtggagcatgtgtccttattaccagttggaacatcttctggatatatgcccaggagagaggtattgcgggatcctctagtagtactatgtccaattttctgaggaactgctatactgatttccagagtggttgtacaagcttgcaatcccaccaacaatggaggagtattcctctttctccacatcctcgccagcatctgctgtcacctgaatttttattttagccattctgactggtatgaggtggaatctcagggttgttttgatttgcattgatagaagcggtaggatggttcaggagggtcaggctgtgatgggactgagcagtgagatttccaaggaagatgagtgtagagcaagaatcagacgaagagcatactggccgtgagtgtgggtctgaagggggagaagaaatagagatgcctgtaaggaggaagagggctagggagggagagtttgcaaggggcacagtgaagaaaacaccatgggaatgaactgagaagagatcttggagaggggtgtctgggcagcagcagcaagtgctgtgctgaggaggacgatgatgggaactggttcctaaccctggcactacagagcctggggcatccaggaaactggctttgatagtttgttctactgacttgaggttggaggtgagaggtacaaattttggacttgtttcccagatttgcttgctcgggctccttcacaagaccatttacataaaaaagttgtccagtagaacttactcctcagccaagctgattttacaacaaatttttctgaatgcttttaccttttaggtagaacactggccttggactcagacttcctctctggctttgctacttgaggtcttagtctgaccagggagctgagcagaattatcctcaaggctatgctatgcatttgtgacatttgtttcttctctctcttttattgtgataggttcaccaaattgaagagccttaacctttccaataaccacctaggagcctttccgtcagcagtctgcagcattccaaccctagcagagctgaatgtatcttgcaatgccctgcgagaagtcccagcagctgttggagatatgcagaagtgagtgctttaaaccactagggctctctgtagacagctctttgggacttgtacatcatattcattaatatgttatgtttgccaaggaagtattggccttagtcctagcagtaaggcactgtgtggtctatgtagacttcacatgttaagagtttagagtgtccgagttgtaaaaattaaactgaagttctttatgaatgagtatatctaaacaaaaggattactttttcattttctgagttactgaattttaagtcttagatactaatgttaagaaaaaaagagagtaatgcatagtagggctggtttgtattgcagttagcatatttccccatgtatgcttttgcaagttgaggagatgggtagtaattcccatttgaatagaagcttaaggtccctatttgtgatctccgctcccctgcccattgttaccctctgccttgtctttatgaatttttgcagcattacagtgatatgatcttaatgaacttgtgtgttgatagtgaagttcaaaactgtctacttttctgtataattgtaatgttcttcttcttagcttgcagacgtttctgctggatggaaattttctccagtcccttcctgctgaactggagagcatgcaccagctcagctatctgggtctttcctttaatgaattcactgacattccagaggtattggagaagctgactgctgtggataagctgtgtatggctgggaactgtgtggagaccctcagactacaggccttaagaagaatgcctcatattaaacatgtggacctaaggtaaccccttttcagaagtagatcatgcttgagtgactggctgtactgtggggtgagttagccacagagtctgggtggtactagtaccagaggaaagcaatgactaattatgaggtttggtcttccctgaagcttgctttgaaaggaatcccactgctgactgactgtctcaccttggttttgtaagcttgaacccagtttgaatttgcatgaatctgtagaaacactggagtagaaaactgtttatatgaactggaagtcatcaagcacacagtggacattgttcttagtctttcttagccttacctgagccatgtgatactgcagagcatctcttgttttgttgttgttggtttgtttttgttttgtttcttttcttttctttcttgacttccttaatttaatgtacccattaagttaaattggtttaaatttctcctatattcgttcatgtgactctgagcttagcttctcattcttcacaaaaatataaattctataatctcctgttaggttcaaatttagctgcccccctcaactttgatcccttgtaaaagcagagagcacattaaaacccaacaagaatcttctggcttagtcgttattcttgggtaggtaaggtcccattgatttttaatcacagagaaacattatgcaaggaggacctggttttgtattcccttaaagatttattttattttattttattttatttgtatagatgtgggtgttttgcctgaatacatgtatataccgtgtgcatgcctagtgcccactaatatcagaagagggtatcaagtccactagaactggagtaatggacaattgtgagctgccatgtggatactaggaaccaaatttcagtcctcaaaggcaaataagtgcttttaataatgagccatctctatgcttccaaggagaagcttttttttaaaaaaaaattactttatttatttacgttctagctgttgcaccctctcccggtccctcctcccacattttgtaatcccattcctctctttgtagacaaaagtggctgcaaactcacagtgatctgcctgcctctgccttcccagtgctaagattaaagggatgggctaccatgcccaactgcaaagaggtgattttattgcatttccttcctaaagaaatgttatatcctacttaaaccatcatcttttcttttacttgttcccccacattgacattctttaatcaaatgtcctcttctgtagcactaattgccccagcccctggcataactggtctcagttttctctcttagtgggcttctctctgtgtattttaccttgggtagtgtgtactcacagcttcaccttcttgatcatcttgactttaatcattcctccatctttttttagctctttgtcttcttgagacccgtttcccttcagctgccagctggaaaatgtacccttgctttcccttatttatatgctctcccctaccagtgaagcacagccggagtttttcagcccctaacatacaggacctgtgcaagtgaggctgtctctgtctcacatgtgtcttccagcacaggctggggagccatttctttgctacttttcacagtgagatagaaactcatattttagaaatgtgtagtaatttgacatcagtactgtatttaagcactttttgtatgacagattgattacagaaaaacacctggagtattcgatgtacatagcaagtcacatgctataggcactgtgtgctggtgtgtactgtggtaacttagaaagaaagccccttggcatggcctgttaagtagtactcttatttatcctcgatcctgtgttagcatttagtagatacagcccttgattgatacttttaactgagcagtacttgagcatagccagccatgttactactgtaacatgcgtgaaagtctcaacgttcctgcttgtggttcggatgccacagtaccacttcctgtgacttgcttttctcttctttctacaccctcgggattcagataaggagtttccttttcaatagcttctgctttgttgggttctctcaaagcactgagctctcctatggaacactgcacagcacttcatgttactgttcgatagagaggcagaggtcatcatccttgtcatctccatgacctcagcccttcacaatgtacacagaactggaatgcagagatttcgttcatggcagaataagaaggatgcttttctcatatcacagatgctagttaggcagctgctgctcaaggatccccacctggagctggaagataattcttcaggctgctcttccacgcaaggagtatcccctttcctttcctttctaggctttaagagttcccattaaaacaccacttcttgtcatgttcccacccatagagtgacttacaagtgggttgctgcttgaaataaagatgataatgccattatggtgtttcagtgtgatgtggtagagaacatgaaacattctttaaattctttctgtcctgttctctcaatgatgaggcatatgttttagtaattgtgcacgttctgatgctctagtgagcatttggaaataggaaaagttctgggttaaagccaaattgtgagtcttacaacccagaacaagaaaagaagaagccaaaaacatccccttagggacatttgaagacatcatgtactgctcgtgctgttgacaaatccttgcgtagagctgtcactcaccattgtgttccagtcagtggctctattacttgtctcttaacagttctgatacatagcagagaagtctcaggctccatccataataccagtgctcctgatccagtgcacaagctcagtgccttctcaactcgggagatgctgtttctttccaaaggaggtgtggcctaccttggtaccaacagatgacattatcatctattttcttaaagtggaaactaaatttatatttgctgtattgtttcatatctttctcatattgatccactgctacttgtctctcgcacctcagctatcactgcttcattcagttaaccaactagttatcagggcgaaagattctttgctatgtttccatctattctaaattgttgtttcccagtaatgcctttcattttgtgatttctcaatgacttctggatgccagtgctcactgtcttctgtcctttgctctttgactagtgttccatggatggagataagtttgcctaccatccgtgatcctgagaatcaagcatccctgcatctccattccatcttggtgctcctgttcagtatgtggctggaagttctttgtgattgcccatgtacactggcttcctttcggaagttgcggtgtcttaggtggttctgggcctgtttctggtactctttcagtattctgtctgtactttctcaaccttgttttttggaaggcagtgcattaagtagatattttttcttctcttgaagtgaattaaataaagtcagtatactttttcctcttcagtctttctggcctaagttgtgtttcgaaatatcataaagactcagacctcttaaaattgtagctgaaaatagctagtgaatgttgccagttaaacaaggccagatgcatggggactctgatgcactaggacatgagtcctgcttcatcactgcacactatctggattagtattgtagttactaatatacttatacttatatttgtatcctttctccttaagactgaacatactcagaaagcttatggcagatgaggtggactttgtgcaacatgtcactcagcttgacctgcgagacaataagcttggtgatctagatgctatgatcttcaacaacatagaagttctgcactgtgagaggaatcagctggtgacattgaacgtttgtggctatttcctaaaggcactctatgcttcttctaatggtaagtagcatactacaccagctggtctgttacccatcaccgtcatccctgccttactgacactcatctttcctcatctctaaaataaatgtcaaatcctttccagataaaaggcataaaagaagaatgttggcttggtatttattcaacacaaaagggaaaattttattgttctatcttgttttttatatcatgttaaattgttcccactggtcatttgtgtcttctgcttaaagtaaggggcaaagtaaaatgttccacgggctacttgattaaatactgggtggagggtgggaacaaaatccactgtaggctccattccgaacctgcagtttcatgttttattgacagtgggattacttggagataaacctgaactaagtgcccactagaatatcgtagtcgcaagattgttagctatttaataagactgcttatttggtggtcatttattaatcatggagctatggtgtggagcccggtagtgaaactctgaacacagtgtaataattcataaggatgtgggcgagacccttaggaacagggcatgcgatcatgatgctttcacatggcatgagagacccttaggaacagggcatgtgatcatgatgctttcatcataaggatgtgggcgagacccttaggaacagggcatgtgatcaggatgctttcacatgtgacatgagagacccttaggaacagggcatgtgatcatgatgctttcacatgtgacatgagagagtgcactaggcgagacacactgaagagagagtgcaaaagaatgcacaacagcacctgtccaagtttctaagacgaacttcacgtgagctaagtgggaggtgaagagagctcgtactgaaagttcttctgtaagcctctcacagttagaactagagtgagcaactagataaggggtgaagttatgaattaagagagcaggactttcagaaaccactgtgcccaacgaacagagctctagctaacagtggtgtcacattcataaatcagaagactttgtgatttgattagcagaactcatttatgactcttcagtatgctgcttcagttgtgaggtacccaaaaacaaggatcgtttgagtgacctttcaggtacagtgtagcacacataacaccaagaaaccccataaactaataggaacagagaatgaatgtcttacaattgcttagaagatgtctctgctctcctgcaggtgtagagttacagaagaaaatgcgctgtacttcctaaactagaggagagcaaaagaacagtgctgttctacatgcagagagtcatgtgaatgtagtaatgtatttgtgttttccctcctagaacttgctcaacttgatgtctacccagttccgaattatctctcttacatggatgtctcaaggtaagaagacagcatcccatagaaatgttgcctcttctatccaaacctgtgcctaagatcttttaatagactttgaaggaaactcagtgcctcatccaagcttagcaaacccctaccaccgaggaagagcccccagctctagaatcaatttagaccttagattgagcctagaagattggagactaaggtggcagactaaggtgacgtgaaggtccagtcattcttatgtatattaactgcgccttgtgtttttctctgagattctttgtcacgttgtccacatcgacctgccaagacctctggaagttgctgggctcttagcttgttttaggtaggcagaccctcagacttttaagtagctttacttttgcaatggttcttatctattgcagtgcctaaaaataaaaagatagatttttctcccccgatgacataaaggcatgactgtgactacagcatgcatttatacaagtgaaacttcactaattttaatacagtaaaattgaaactcaatttaaggaaatacccaaaatttcagaacacatggggctctgggactctgaagatgccagctcttaagacatgtgagggtgtgagctacagtgtttttgagtcatcatccttttggatcccactggcactgtgagttgtaaggtacacacgtttacttttcattgtaaaagtacacacatttagctattttaataataagcaccttttcagtttttaactattgtaagaattattccaattgtaacttattataatgtagacataaagttctttgaattgtttaatgaagtttcaaaaaaatttctacagttttatttaacttaaatttagacattccttaagttctttgggttttgttgtttttgttgttattgtttgggtttgttgttgttgttgttgttgttgttgttgttttgtcccacctccctcttaccaaccctggatataacttttcaattcttaaatgaaaacagtattgtacacataggtacaaataaataccttgtataaatttatttcagagagctgtttatagagtgcacctatttccatttaacttactgaatgtaataggcaaatggcaccgactgaaatcagaaccctgaatattgttcatcttcctttgtaaatctcatgtctggatcttcctcatgtgcactacttatgtacactacttcctagggtgccaagaaaagtctttagtagggaccttagagctcttcagcacagagttctatacagttttaccgtttatagttttaatattcatatgctacagttgcatcaataaaggattttttccatttccctctcttgttaatctgttttcataagtcaactattactaaataaatcaacttttggagcacaacactgcccaagtaaccacatcagataattaattctacaacatacctggccatacattgtgtcactctccttccccatagctgcattttcatggacatgtagatttggggattattttaatgccaattataaaatgtacatttgaaaataaaaatttgttagttgatcgcttttgttaactggatcactgtgtattttcccaatggtagtcccctttctgagtctgcagtggtctcaaaagacgttttaacatctgagaggtagaaggtttttagatgttaaagatgatgaagatggcatatctgtgttagcttttattttttttctattataataattcatcttggttttaaaatacaataaatgcatatatcctttgacctggctcattgtagtttggcatttctcttaaagttttatttttctgtagttgtttggagcttagaagtacatctgaaatgtaaataaagaaaatatctaatagaaaaagaagaagaagaagtagtacatttgaggggctggagagctggcgcctagtgaagagtatatagtgaagagttcttgcagagaactgtagttcgctcccagcacctacaccagtggctcactcctgcctgcagctccagctccagggcatcctctgccctcttctggccccagtgtgtacctgcatgaatgtgtacatagacacagacacatatacattaaagaaaaaattaaactacatatttaaggccagatttaatttttaaaatattaatgtttatgttcttatctttagaaactgcctagaaagtgtgcctgagtgggtatgtgaaagccggaaattagaagttttggatattggccataatcaaatatgtgaacttcctgcccggtaagcaattcagatcaaatgaaaggatacaaaattatagatgatcggtaatactatgctgattcagtttttatcttattagcatattgttttgaactcgaagagactctgaattttaaaatgtattcgttgctttttattcatgtatcatcataggatggagacttttcaggttgacattgcaaatctgtaccaggcagtggtgttgattggaaaataataaataaaccacaataaatgttaagacacttagcaagcaatataaatggtttacctctgggatcttaattctttcagaatctctacttctgtctcttgacagcatgtctaccttaccctagacaatttttgttttcctaaggatataattttgttggtggtgagatattaggcaagtagatattgttagatcactaaaccttgaaactgaaagctacattatctttttctctttgaattcaaaattggatcaggaaatctacaagttttgctttctttctcaccattaacatttacctattttcataattggtatttcttatagtgttgaggagtgtgaatgtgaaccagtgcacatgtggaggccggaggactgcctgggggaggggttcagttctcagtctgcctcggagaaagaagtcgggtcttttgtacatgctgatggtgtatcaggctagctggcccttgcacttttggggaccttattttacccatggaagcacaaggacttcctacacaagtgccaccatttttgtcctttacatgatgtggggatctaaatgccagttgccaggccccaccatgagagttctacccactgccacctccccaggacattatgatctgtgctttattaacaagattttaaagctgctatgtgatgatctgcagcatccatagaaaaagataaaactcttccaggagaataattgtgaccagccagttagtaagcaaaaggggaagtctttcccagacttctgtcatgaagaatttcttctgtgatgaatgtagtgttcacctcagtgctcctatgctaacatgggagacttgccatttgaagtggggctcttctgaccacagcactcattgttaatttcaagtagtaattaagcttagctgatggtcagttgcttccaaaatttaaagttcagttatttcaacatttttagccaatcataggacagagaaaagttgtttctatcaatgtacaagcaaaaatgtcaatgtaaatatgatagaaataacctttatttgatctttactaaagtcttcttttagttgactcttaaaagtatgggaagggtctagaaggaaggttctatcactgaagtgcctttcacacaaaaataaggacatgggtttggattctcagtgcccacataaaaaagccagctgtggttgcatgtatctaaccctagcactgggaatctaccacaggcagggccctatggtgcagtggccagtcagttttagtcagttggtagtctgtttcagtaggagaccctgcctcaaaaaataaaggatgattgaggaagatagccagtgctgacttctgtcatctgtgtacatgtacacacacacacacacacacacacacacacacacacacacacacacacagcatctgagatgtacctatttctaatggagaactaaaaagatagagagatactgaaagtgaaatattagtaataatagtactaaaagcattttagatatagtcatacaataagaattgtctcattttactttttaatgttgcaccaagagagtttacagcaagagcatacttagctcttgctatgttgtaataaaatgcacccaagttatatttcagtcagtgacacgataaatttttttgttcttcagccatcataatacccatatgtcttatccatttaaaaatgttttctggcccagagtattagttaattgggcatttaattaatgcccatgcagtagtcatcactagagacagacagacacagcctatgcccagtgcttttagaagaggaacacggaaaaaagactggccacagataggaaagaaaattgttggaaaatgttaccattgtcttttttgctattcctctgtgttgtgtttcactcctgttattcctcagtctaacaggcagcgcgtctgtaactaaatgtgctttcactttagtacaaaaggatagtattttagctaagactatttttttgcattttcccaaagctaatctttggttctgcaccagtataggctttttggtgatctaaacaaatgcttattcaaaacaaatgccaaatgttatattatcatagaattcagtgttttatattttttaatgcagaacaaaaccaatccccattgcttcctccctctctgttcttagctgtagatttgggtgatccagttggcggtatagcgttcatgtaaaagtgattcattagaattgattcgatatttaaactttgtgtctctaaggaaggtatataagtttaacaaaactagttatttattaatgaaaatatgttactagagaagtaatattttaatgtgtagataatatccacaaggatcggcctgaatctagttagcatttgatagactaatgctgcagttaattgaaccccacccattctgttctctgtagaataaaactgtgaacctcttaatcttacaggcaatggggagagaaaaggggaagactaaattataagtacaaatgaagtaaaatgtaacgttttctcagttatatttatgaaagcttcatgctctgaagcgtttgtttactgtttatcttctctgaaaagattgctcagaagtgtttggacaggacattagcctgtgggtctcagagaagcatacagccttgtaaagctcaccttctttacaaggttagacaaagctctctagtgtagtgtctctttctatgaaacaaatatagaaagtactgaaatacaagtagctccaagtctatattaaaataaacctgctaaagctggagagatagacttcagcagcttggagccctggcagctcctacctaagactgagttcaattatcagcactcaactgtgcttcacaaccatccataactctggttttaggaaattagataccctcttcagacagccacaggcaccaggcacccatgtggtatacatacatacatgcagggagaaaacttgtatacattaactaaaataaatacatctaataaaaggttaaaatgaacttgttggcctgcacggaattatataatatgtggaatgatagttacttaagtctttctctgttttaatcctcatcctaaattagctttatataaatagttgccttctccttttgtccattttcatacagcctgttttgtaatagtagtctccggaaattgctagcaggacacaaccggttggcaaggcttcctgaaaggctggagagaacttctgtggaggtcttggatgtccagcacaaccagatcactgagctcccaccaaacctcctcatgaaggctgacaggtaaagtgttccctgtcttcagtgtcacctcagcctgtgcacagggctgtcactaagaagttcatcacctatgatctgagctcattggtaggaacttctctctctcctaggtgagtgaatacatggcctaactagccacctttctaccattttgtatggaatggagaaagcagcataccttatatctaatttcaccattctttacagaaaggtattttgcactgtggttaaatatgcatcatgggaatgagatgtgaactcttacactgctccttagacatgaattgtgcaggccttttaaggcttagcttaattatctgattgtcttcattttattttctgttgccatggtaaagaaccctgacaaaagaaatgtaaggaagaaagggtttaattgcctcacaattccaagacacaatccctttattgtttgggaagttaaggcagcaggaacttgaaactgctggtcatatcacatgcatagtcgggtgcttagaatagtgaattaatgtgctcatgttaatgttcaactcatacgcaatcctctactcttacataatccaggaatctacccagggaatggtgccacccacagtgggtggctgggtgttcccagtaattgaaaatttaactttagttttttaaggtgctagaaatagaacccagggcctgatgtatcctgggttatagacaaatattttaccactgagctacttccccagcttccagtcaaattttagtaaattaaattttgatcagttttcctaaataacttgtatctaagaatttgaagaagttgatttgacatgagggattaatttaaatattaagtgaaattctaatttctttttgaaattcagtaaacatttaaatacttggaggttgagagaaaacccagagtaggcaggttgtaaatcttggcagctgctgtgaggagggagaaaggtgggtctgcatcatgtcagcagtagaggtctgcaagcactgtaaactgaagccccggctgtcagggaaacacccaagtgaggattggggctttccaggaagcagccttgacatagacttcttgtgcctggtttcagttgtgatttgtttttttcgatggttcagccactgtgctttatgctgtaggacattgaaaatgactgactgtagatgtaccaccaagttgcttcaactctaatgcacagcttgtaaacaaaactgtacagtgaacataatagaagtgatttaagaggtagaaaagacagatgaaaaaagacagggacagcctggcatattggtatgaggaagaacacttaagtgttgtatgatgaaatgaatttactatttgtgtttaacaggtaactacaggtattactgaaaccacctgaattactttcagcttgctctgtaattcaaatcttagcaatagttttcacaaaataccttttgtgataataaactgtttccagctttaggttaggtcttataactgagcaatagcatgggttgatctgctttccctgttagcagcaaggtttttggtatccagagaagggaatctactttcaattaggtgacatccagtaaagtgtccatgcctcccctggagctggggctacatcttattagcattcttatgacttgatcaccaggttatgaatttaagttttctgttcacttttgagttttattgcttagttcatactctatacttgaattaaaatgtcacactataaatattatgttcacttatgacaattaaaataaatatgtattttaaaataaatataagctcgtaactcaaagttgtagatggatgtgaaatttgatggaccatatattgttaagaaattgactttgatggccaggcagtgatggtgcacacctttaatcccagcacttggaaggcagaggcaggcagattctgagttcgaggccagcctggtctacagagtgagttccaggacagtcagggctacacagagaaaactctgtctcaaaaaaaagaaaagaaaagaaaagaaaagaaaagaaaagaaaagaaaagaaaagaaaagaaaagaaaagaaaagaaattgactttgatttttgcatcttgagagaaggcagaatttggttctattgggtaaactggtaaatattaatcctcatcttgctgaatatctttgctgagagttctcatgatggaaacaccaaaggagtttcagatacatatctgtcaccagcagatggtcggaggaaggctaggtaatttcccatgcatcaccagagtggatgagtcacagccagaggtacttctatccttctgctctttcttggaatcttggcagtgagtgattccctgtccacctagcatcctcatgcacatttgatggccagatagcttctcttgatggagttagtccaactaagaaaactggaacagatgctttcaaaggaaagttgcaatggatgcttttaaatgaaagttgcacagatcccagtactcgtgggacccagatctatttttatacctggttggagtagcagagggatgctcagaggtgggagatgggctggggacatccatgtgccaataaggctcatggtgtttttcttgtgctcattaactatccctagagtattagtcacaccataaaccataagcttgagtgactcagaaagaatatttctaaatatcaaaggagctaaaagagaacagaaaatcagaggagagtgatcaattgaccatgacaactggtgccttttggcaaaggcagatatttctggcattttgaaaagctgtgagctatctttgaagatgtgatgttttgagagatgtggtagattaaaagtgtttctaaaagtatgtcttcagaagcctgtagagaacttgcagattcctggcttttatctccattcttcagacttagatgttagagaaagagagctggaatcagcctgtttaacaaggccagcatcgtaattctaatgtgtaaggtctaccaaacactgaaagctcaaggtgcccatgggaggttctgctgacagattcctaaaaaaaaaaaaaaaaaaaaaaaaaaaaagacttatccacagaaattgagtttccttaggatagggcatatactttatctcatgtttttcagatatttgtacatgatagctctttgggggtattagcatcaaaatcagttggccagtttgctaaaacagagaatcagctgatgagatttagactactacacagaaaatgtccaagattttcctccatcctggggaaagaaagggcatgggtgcactttagacgacagccaactctgtgattttcagaaggatcatattctgataagtaattcgtggggttagcagggatgatccagaaggctttaatcaagggttctaaatgttcgtaagagtggctatgtatagtgtccagagaggatcatcaagactgctgtctgctctgcaggatgcgctggtggcctttgtcacccactctctagaaccctcacagcagatgagctgggccatttgatctgctgctggtgcttacaggggtcacctgttcttagggaaccacaagaatgcattaggatgggaggtgtgcacagctgtgaattccacactagacagaacccttgcagttagattctgcgtctactcctgactcacttatggagagtagctgagggttaaagctgaggtgctgctcctctgagagcccactgggtaatggaagcacatgcatgctgtgagctgctgacctagagcagatgtatggggaacattgctcttttagctgcctccaagtgacagattctccaatcttaactcaaaaagaggtaaagcctaaacaaaaagagaagtaaacatcaggtttcagcaagcagcctcaaattcccttccacccattgcctgtcaggctgcatagtaacccagcacaggagacactctgcaggacaacagaggaaactggcagcatggaggtaaagtgagtgcagtgcagagggaaggagtgtaaaggaatgttctgtgaacagaacaccggaggacacagcatccatctgctttcaatccaaacaaaactccttaggatagcacatggtcccaaagacttagaatcccatagacaggagagagaggtggctccgtggttaggaggacccactactcctgcagaggacctaagtttgtttcccagcatccaggttctgcttctcacagttgcctgtaactccatctctgagaggcctgatgccttctggcctccacaggcactgtactcaggtgcaacaagcctacacacatatgcacataatttaaaaatccctaaatactcccataaatatccagatgccatgaaaatcaacagggaaacgatgaacgtatccatagtaacagtgtctaagaaaaatcaaagaacacacatcctcctctatgttatcctgaagacaaaaatgtaaggcaacattccaagctgaattaaattatctgtgagcatttgggaatattaaaatgaaaaatattgggaagttaagaacaaaaatggacaaatgggaagagtggtcattgaattcctaaaatggcaggcaataatagtgattttataaatgagcagtatattaccaggtagataaagggtaatactttcaaataaaagttcagaaagaggcattaaagacaagcagagaagtaaaagtgaaatgaagaaataaaaggttagagataaaggagagtgggaaatgcacccaggaggagcagaatttgcatatcgagagcttgcagaacggagaaaggagtggggcagatttttttctgacatataagcatatttgacaagaactactgagttggggccctggatactctatatcaactctgagatctaatagatttagattctgaaaaattaagcattacagagctacattaaaaggttggttaaagggatttaaggggacacatatttagatagtcaccagaccccaaaagtattaatgcaaagtaataatggagcaacattttcaaaattgatcaaagtatgacctaagctttttatagcaggacaagctctctttaagaataaacagaaacttagttatgaaaactaaatatgccataaagaagaacttaaaagttagaggtaagttaatgtgaatggaagagggatcataaaagagtggctttatgtataagtccttgaagagcaatgataacaaaacattcacagaagtagtactaaaattgtaatccaaagagtatttttgtcagtacattgaaaattttacagtagaaaatcaataagccagactgttaaatgatcgcataaaaatccaaagggctagttggagaaatgactcaattggtaaagcatcttcccattcaagcatggagacctgcagatggccaacccctggggtagaaagccaggagtggtggcttatgcctgtagcccagctgctgggaagcagacagcaggattcctatagcgtgtcagacaacgagtttagctggatgagtgagctcttggttcagtgagaggccctgtctcaaaagctaaggtggaaagtgactgaggaaagcatccagttcagcattaacctcttgctattatttgcacagcacacatacaccattgttaggatctgggagccatttactaacaatgtatagtacgaggtaactgttggaacaaacccagtttccttttttaaaaaatcttatagaagaaaattgtgtgtttgcatataatattataatagctgagacaaaacatcaaacacgcgtgcgcacacacacacacacatcattgcatatggttgaacttaagtctcctcacaagtaaaattacccatgtcccttaggtgataggttggtgagtaaaatgttattgatctatttgtgaactatgaattgtaagccaaaaagtttccatggaaagatgcacattgagtgatactttattacccgtatatacacacaccataattgagaaggcactgttttagtgggaaactatagggatacttcattaccctatatatacacaccataattctaaaagtcattttttaatttaagatttatttgtttatgcatgagtgcatgtatacctgcataccagaagagagcatcaaataacattgtagatggttatgagccaccatgtggttgctgggatagctccagccccctaaaagccactttttaggaacccctggggtgttcttgttagggctggtaatgggactagggtgcccattatttctattactattcaatgttacattagatatattagccatgaaattgtacaagaattaattacagacatagaactagtaataaagagctaagtttttgtttgcataaaatatagtagcataccagaaaactctagagtcgctaataaataacccactcttaagcatttcggttgggtagggtaacaggatataaaattcatatcaaggagctttatatgtataagcaatatagacagtatacatcagtatgttgattacaactccccatttaaaataacatcaagaaagattggatgcttagaaacaaagaaatgttcaaaaattatatgaagaaaacaccgaaaacgtctgaaatttacagaagtaaaccaggactgattttaactatagagctgaaaaaacacaagatgaactcaaaagtaagtcaggaagcatgttgtctctgggacagatctaggagtaaatgcaaaatgagagtaatgagttattcctaggagcataagataaatgcctgcagtcttcatttgcacaaaataaaaactgagtaaataaataggaagtctccttacagtttaattccaaatagcataagtagaaagagtcacacaaattttggctaacatcattgaagaaaattgttaaaagatactaagcaagagccaacaagttgggcttggctggtgaaggcactttgatgctcaggatgatgtcccaagtgattcccgagacccacatggtcaaaggagagagctaacacctgccagatgtttcctgactctacatggtagaaaactgtgaacagaaaccaccaatacacataagaatggataaataagtaaaatttaaagtgaatgtatgataagaaataggatattggcttaagatatgagtcttaactgatttctctgtaaatttaataactaccaggttgtggaaaatggaagcgtaagtggttataattaataataccaattaatctgagttaatgttgactataatatggcgttggccttgtgttccttctaatatggtacactgagaatggtgcaacctttggtctctgccaaaaatacacaaccttattttcatgatgagagaccatgaagtaatccacacagagtgacattcttcatgaccttattctaccaaggaaccatgtagcagctcatatgtagctgcatccacacacctgtatgctagagatgaaaaacgaagaatatggagtaacatccttgtcttgctcacttttctattactatgctaagacatcatgaccaaagcaatttagaagaaagcacttgatggtatttcaaagtttcaaagggtgattccatgaccatcatggtagaaaacatggcagcagacagacaggcatggtactccagcaatggctgagagcttatacaaggcagaaagagagtgagggagagctaatttggagtggtgtaggctttgaaacatcaaagtttacccctagtagcacatctcctccaacaagaccatgtgtcctaatctttcccaaacagttccacaaaacaaggaccaagtattcaaatatatgagcctaggaggccacctcaattttatgtgatcttattctactgttggtaaaccatggagtaacacatatggagtaacattctgcaaaatgattatctggaaccttcaaaggtatcagtcatttaaaagtcagactagtgagaagtgaagaagaatacatgattagagaagacagagtggtgtgttggccctcgtgaggagtgcaacgggataattgctgcacctaagattcaatctaaagatgtatcttcagtactatatcagtgttaactaatttaagtgttaactaatttaattaaaattaactgttgtgttcaacagcttgttaactgtgtgttgttttgtgtgtttatttaaagcctttattttctgagtccttagaccttctccatagtgttgacgtaagtttgtaagactgaatgtccttcaccctcattccttattctctcatactaatcctacaccatcatccatcgtgatcatgttttcaaactgcttagtgggatataacatgaggatagtgagctataattaactcttaaaatagtgccaggcctactggctcctatcagtggtctcagcattcagaaggatgatacagaagaatttctagttgaagccatactgggctggctatatagtgaaatcctgtctcaaacaatccacaatggtacaaatcactatatatcacagaataaggctaagtgctgttgcatgaactttgagttacacatcattgcatatgtacaggctaaccacggaaaacatgtgtgctaagtagccatcataagatgttagaaaggccatgagagtatttgccttgtcaaagtgatgtgaaaagataaacaataataagaaatgtgggttgtattgtgtaacaccttaaaatatggtacacagaattcaaagaataacctaaaagtagagtatttttttctcttggctattggattaaaatagaaaacaagtcctagaacttatcccaaaggttaattcaaacacacagtgtctgattccttgtctgttgtaacactgaaccctgcactcctctacaaagataggatgtctgtaaaattatagggtgatgggcacttctgaaaatcaaacaaaacaggataacccagaatcaggtggattgtgtgccaagacagtagtagccctagaggcaggaagtggctttttgtcttgctgtgccttccctagtgatcttgggagggaaccatatctgttccttgttatctgctaagaagaggtgtcaagctcagagccattgtttataagacttgagtttgaagtgtcatgcacacagtctcctcacattggcccagccatcccagccatctctgctagaccccagcagctttggagaaaggggcctgtgaaatcattcttggaaaaggttttagtcctgtttctaacatctgaattctggagagatgtgtaaggagtaatgggctgttgaaactggtgacattcctgtctgtgccactcatctctgtgtgaccattgtcaagtgatctggttttctctgcttcattttctgtcttctttgaaacgaggtacatctaggataatgagaacatccagggagatggaaaatagggacaccctctgcttccgataaagcaccttataaatgaaagcatgggtagcattttactgccttttctttaattagatgattatgttgtgaacagagctacatgctgaaacatctttacattaaacagtctttcatgctgatattatagaagctgaaaagagggaagtttaagaatagttagcgcatcacagtggcttaaggagtgtagcttgtagtccaggttgaacacacagggagggctgatgcagcttgtcatgaagtcagctattcactgcactggagaatcttaccactgcagtccttctcctgttcattctggtggaaggatgacatctagaccattattcagctcctgctacagtattcaaattgaagaaagactattttaagagagtggatattgcacataattttcctgaggtcgtgataaaataaaaattgtgtcagtccacatgtttggcattagcatagttgtgctttatgtggttcaaaaccatcctttggagctaacaaccatagttccagctaacttagcttcacttcttgaaggagtatggcacgaggtttcccccactcttaattttctgtggagagtagagagttccatccaagctggcaatttcaagccgccaaggaaaagttcttggaaataattttcttcctcctattcagattggagagctattgaaatcccgtttgcagctttatagatgagcattgatgtgtcagcggttttagaacaacattttccctttttcctggtctaaaatatgcaaatattcatgaattcattctctctgcaggctttcatgtgtctttaactgcacatttcctagagaattgtattttaatagttgttatatggtttcccaattgaccctactgcatgatattttaagggcaataaaaatagaattcttaaattttaatttattctaattctgtacagattgaattcttaactgatatatttaaatcagcttgtagaaatggaacctagaaataaagaactttaatgggaactagttttcttcctagctaaggccagtttgaaaactgagtgaccttttattttctactctgtaacacagctataatttcccatgattacttggtttctacagcccatttcaaccctcacctaaccacccttgttttctttaaaagtcaacagaatacatgtttctttaatttgggggaagccacttttccttgaataaagagtagagttgggtgtgtgtataagtgtggggaatgtgtgcagaattgcatgttaaattagtgtatgaggactgagagtcacagtactcgaagggcttctaatataagccttttaaacttttccaaaataaaaataactgtatccaacaccctatattcttccttcttttaattcctttttctcaaaatatgctagaacagcccagaactcatattcaatatttaatccaagatgaggttttaaatatttttattaattctttttggtgatttgatacaattttttttattatattcattcccccttctccagcgtttcccagatccctgaaacttcccctgctattcaactttgcgttcttgttctcttactctcaatccttcctttaatcgggtgagtccaatttgcgtttcctaaatctcttgaagggggttgcactggagcatggagaccacactgttaaagaaaactaactactctctctgaaaagctttcaaatgccagaagctcttgcactgcggctggaacttcatgcccacctgtcccctcatgcccatgtgtcccttcatgcccacctgttccttcatgcccacctgtcccctcatgcccacctgtcccctcatgcccacctgtcccttcatgcccacctgttccttcatgcccacctgtcccttcatgcccacctgtcccctcatgcccacctgtcccttcatgcccacctatccccttcatgcccacctgtcccttcatgactacctgtcccctcaggcccatttgtcccttcatgcccacctgttccttcatgcccacctgtcccttcatgcccacctgttccttcatgcccacctgtcccctcatgcccacctgtcccctcatgcccacctgtcccctcatgcccacctgtcccctcatgcccacctgttccctcatgcccacctgtccccttcatgccccctgtcccttcatgcccacctgtcccctcatgcccacctgtccccttcatgccccctgtcccttcatgaccacctgtcccctcaggcctatctgtcccttcatgcctacctgtcccttcatgcccacctgtccccttcatgcccacctgtccccttcatgcccacctgtccccttcatgcccatcctgttccctcatgcccacctgtcccctcatgcccacctgttccttcatgcccacctgtcccctcatgaccacctttctccttcttgactacctgtcccgttcatgctgggatgtttttcctggcttgagtttgcaaaggctttatgggtcctgttataactgttgtgagttcatatgttcacctgccgtattgcatctagaaaacactgtttccttatagacatctaccacccctgtttcttacagtctttttgtcccctctttcacgatgatccctgtgcctggaggactggatgtgctttgcatgtcccatctaaggctgggcccttacagtgtcctattctctgaatgttggccagttattataccaggtgtttgtgcactatgaaaatggcttatttccttatggaagatctctgtggtgggcacctggatgtgtccacaaactgatggtgaccctgtgcactgagcactccatgcctggttgtagcacctgcatagcctggtatctagagctatggtatcttctgtccccaccttgtccttcctgtccacttggaggatttggaacctgattgaggctcggttctctccctgtcctcagctctgcattgttctctaacttgtgcttcacagtaagtggaaggaagtgagttgggttatcttcagcatacacctgttgtttgtatttacccattgttcacaccatcctctggtaaccatagcagcattcattgtctttgctgcttgtttgagtgtaaatcttcttgaagtatactgtaagtatgggaaagtacatagcaaaatcctaagtgtaggacctgatgactttctcagagtaaacacacttgtataactagcactcagtctaaggagaccgaaatatcagacaacctttccttgtattgactccctcccacctgtgggtggtagccaccctgacttctcttaccacatagtattgtctgactgggactctatagcaatgaaactgtgaggtgtatccagctgtgtccagctctggctggctgctttcaccactgtttttatgagagccagcccttgattcagtagttgtaattcttcattcctgttgctaccagtagtctattaattgctacagggtagatagattgcctcaaatagccgtgtctatttgacagtaaaatgttgtacagcctcatggaaaaggagcacatgacctcaaggtttagttgtattgtgatctgagttgtttttagtataagaaattctttgttttaaaaataagctgtgggctggtgagatggctcagtgggtaagagcacccgactgcttttccgaaggtccagagttcaaatcccagcaaccacatggtggctcacaaccatccgtaacgagatctgactccctcttctggagtgtctgaagacagctacttactcacatataatcaataaataaatctttaaaaaaaaaaaaagccgttactgttttcttccctaagtcagattattagcattaccttggccattctctaccagctataaaaagaagcatttcctgtgatttttgcattttagtaaaaggtgatttgactttgtgtttaattccagatagctaatatgttcaacatagcatgttatattatgtaggccagggatcaatacaccagctgaattaaactccctgaagccaggacctgtctttgtttgtgtttctaaacgcaactcctacctttgcctgctcatggaccttctggatttaatgaaggagctgaactagagctctatcttgttaatggactttcctgcattgtgtctctgcagcctgagattcctgaatgcatctgcaaacaaactggaaaccctgcctccagccacactttctgaggagacgagcagtatattacaggagttgtacctgacaaacaactgcctcacggataagtgtgtgcccttgttaacagggcacccccgtctgaagatcctacacatggcctataaccggcttcagagcttcccggcaaggtaacaggggcttgtaaagtgctgtccttacatacatatccacagaagggggaggagtcacagaagaagcttgacccatgggaattaaagtatgtttgctcgttctcctcatttacagttatctgttatgtaagctaaaaccaaaaagtattcccttacaactgcattggtttttctaatatgagtatatcccaaaaccaaaccactagaatgtccttaagattttccaatgtgtttttagtagttttctttttttctgttgcttctctttagctaccgagttttatttgaaaaacaaaaactactgatgttgtgtttaagagttgggatgtaagatacaatttgtaaaacacaagaaaatcaagaaagaagaccaacgtgtggatacttcattcctccttagaatagggaataaaatacccatgaaaggagttacagagacaaagtttggagctaagacaaaaggatggaccatccagagactgccccacccagggatccatcccataatcagccaccaaacccagacactattgcatataccagcaagattttgctgaagggaccctgatctaactgtctcatatgaggctattccagtgcctggcaaatacagaagtggatgttcacagtcatctataggatggaacacagggcccccaatggagaagctagagaaagcacccaaggagctgaaggggtctgcaaccctataggtggaacaacaatatcaactaaccagtaccgccagagtttgtgtctctagctgcaatgtagcagaagatggcctagtcagccatcagtggaaagagaggcccattggtcttgcaaactttgtatgccccagtacaggggaacaccagggccaagaagtgggagtgggtgggtaggggagtagggcgtggggagggtatagggaactttcaggatagcatttgaaatgtaaatgaagaaaatatctaatgaaagaaagacagaaagaaagtaaggaagcaagcaagcaagagaaagagagagagagaaacagaaagagagaaaggaaggaaggaaggaaggaaggaaggaaggaaggaaggaaggaaggaaggaaaggaagggagagagagagagagagcgagagagagagagagaaagggaaggaaggaaggaaagaaaggaaggaaagaaagagttggaatgtagggtgactagagagatgagacctgttggtttttgagaaggacctgggtttgggtttccaacacccaaatgactgcctatactccaatcccagaggatccagcacccctctttgacctctagagatgccatgcgtgtagtgcacacatgcatatgcagccagaatatacatacccataaatataaattattaaattacctttgaacaaagtgttggcagttgaatcttaccaagtaatagtaccctgctgggtaacagtatcagtacttctaagaatacatttctctagagggatagagggaagtttttctttattgaagattacatttttattttatttttggtttttggagacaaagtttcttcatatacccttgggtgtcctagaactagccctgtggaccaggctggcctcaaattcacaaatatccacttgcctctgcctctccaatgctgagattaaatgtgtgcatcaccactgctcagcaatatttagtttttagatagacttttgttcttacacgtatttatacacacacggggggagggagatgattcggtggctaggagtacttgcttctctttcaggagacccaagttttgttctcttttaccccaaatctggcttaaccaccataagttcaattctaggagagtggacaccctctcatacagacatatacacataaacaagcaatgaaaaatttaaaatatatttaataggattttgttcatatttactacctaatataaactgttgtaaaaacctagtagtagcaatttttgagattaatttgctatagagtttagtaaaacagtgcatttgtagttttaaatttatttatggtaatttttaacacttagtgaatactatctacagttaaactacttgttctttttttttttttattttatggaaaaaaacttggcctgtaaagcagaaacccttttgtattcacacttggtttaaggaggtagcccactacataaagtgctcacaggacaagcatgagggccccagtttgactcttcagtgttcacatgaaagcaagcaagctgacttatgactgtggccccagccctgggaagactagctgacaggtcccacctactggctgtcacacctagccaatcattgagcaatatgttcaagcaagaagtcttcaggaatttttgtttccttcatagtaggccactaaccaaatgactatcttcaaagttgcagtggagaggagtagagaaagatccactgtgacctctattcactaccacatacatgtaactaacacacacagagacacacacacacacacacacaagaaaatttgatgtagctcaagggtagaaagcttgcctagtatgcagaaggcccaagattccctcctcaacaccacagaaaggaggaagggaggaaggaaagggggggaaaaaagacaaagatttaatggtgacctcaacaaacacaaaaactgctcgacattgtaacagtttgctctgagaaggttcgagtttttaatctttctgtttggtagagcaatggtatcctgtctgactctgcaaaaccccatatactgagtttgtccatttcattgacatttatcttacaaggtaggatttggaagcaaactctgaccttctggtcttctgcaggtcagtgcagctcagcaaaggcatcaaatcagcaaacatcccttctgctgcccaaggctacttcccagtctgttgaagaaggaggggatatgttgactttggttttgctaatagtggttcattcccatccccccaccccaccccccatacatttttattttactgtggaatgcaaagataatgctttgggagtgagcgcagtcacagtcatacatagtaatgtgagtcaaagggcttctcttgtctgattctagacagtatctatgtgtgaaaagcaatcattggctctggggctatgccccagttacccattgcaggtgtcaatcaccaacatgaagattacaaaagatttttatatacttggaagaatattaatcttgcgatgatttctctcctatagggttataatatgtattatttccctagaaactgtactcctgaaagactttctatctccttcaaaatagaccactagcccgatagttgggagcaggctccagaaatgaagccatcgctcagccacctctgtctgtgctgagaaatgaaaacttttccttccttgggcctagttttcataccttccttcatttttcatacctcacgacccattgatttcttcatatttcttctaaaatgtgaggagcaacatagtaaaacatataggaattcctggtgtcataaaataactgcctcatactctatattgttacttgttctataaccacagagcctggtagatatgttttatgatattaaaagacatgatttaatagaaaacttattgttatatatgaggcatatgtttatatcaagacaagaaagagataatctttagcatttgagaggaggtgacacagcaatagtgtttcttgatgcatttttcaatgttttgggacaagtggaaccatgagtagataaaatggcaggtattaaattcatgacaattgtcatagtccctggctgttcatcaccagggtgggaatggatctaaggactgagtgctgtgaggtggacttgttctgccctccacactgacagacggtgtgaagctctgcttcctgagtcgtgccctagttgctcacttgcattattcaaattagagatggctgaaaaaagttattcttaagtaaaatgctaaattacattgaaatatgtaactagagtaaggttgaggcgacccatctacatagatgattaataagacatggacatagtttcttttgcagccatcgtgaataaggaatgaaggagaggagatgttgtatggcttgctcctcacccctgctttgtaatcatccatggtcccagacaggtttgagtgctggctctgaggccaaaagcttactctgcatcttctctgcatcttctggaatattcatctccaacacaaagaagccatgcccttatcctaagctcaaagcacttagtgattatcattgacttttgacccatttgactaggatctccactggaattcagactatgttgtgtagtagtaaaagaaaatttcagaggaaaagaacctccattttccttcatgttgttaccttaaaagttgaacttaggtgtttgttatgtgagaagaaaggaaatggcaaaacattttgttactcaaaagcaacagtgaaaagcttataaaaatcattattataagtgaatctttaaagtctattttctcattgtgcctctatatttaaattgtcttatagttaactgataattctcccatccatttcttttagtaaaatggcaaaactggaggaacttgaagaaattgatatcagtgggaataagctgaaagccatccccacaacaatcatgaactgcagacgcatgcacaccgtgattgctcactccaattgtatcgaagtctttcctgaagttatgcagctcccagaagtcaaggtatgagggtgatcatggaccccaggcttgcagtcagcaaagagtttccttcgcacacacggtggaggctgtgctgtggtggctttcacgcggcaggatacgccatcatgagacttgacagtaaccttgttctgcttggtgtctgtgcctgacttaatatcacaaaactcttaagtgtagagaattccctcttttgctgtggacgtttttatttgtttgcttgctttttaaatacaaaatacaaacagctaaaggccatgaagtcctaggtttcacttcttacatcttagttactttgtctactgtggtaaatccctggcagaagtagctcacaggagaaagagctgacgttagctcacagctcacacacattctgcagtaggaggaaacccaggcagcagagggggagcctcagagggactgatgactgatgcttgtgcttagcacgctctctctgttgtgtgcaatccaggatcccctgccaagggggtggcttacccacaagtaagatgggtctttccatatcagttactttaatgaagataacccccacaggtttgcctggaggcccagcgcactgaaacctagactctgtccaggtgacaatgagcactgaccatcatgacttagcactaggagggtgacaagaagaggaaataggagtagacatttagtctcagattttaactatatgttacaaaatatagtcttactggatgaaaaactaatcctagcctagctttttccttagatttctgaattcaggtcagtgctttttgtttctgttgaggtccttcattttctgctcttgtttctttaacacactctgcacctccctttgaaggttttattttcattttgtgtgtatgagtgtttgtctatatatgtaggtgcttcttaagaataaaatgcattccgtgtatgcctggtgcctgtgaaagccagaagagggcctggatcccctttgaattgcaggttgtgagagctgcatggccgtgctgagctccagagcctggtcctcagctgagcagccagtgctcttggctgtggagtcacttctgcagccctgaaaccccctttgcttcctactgatgctgcttctaaattctttttcctttgctttgttttcatccattttcttttgctgtagcagttcccatttctagctcctccattgtgaacagatccagtaattattgacttcaggaggcaagtggctggcatttgagtatagagcaaggatttttttatgtacccaaattgctgttgaaaagaatagttttgttttataagtctaaatgggtattttatatatcatatatattcatatgatatatatttatatatcatatataccatttatatgtatcccatatatatatatatatatatatatatatatatatatatgtgtgtgtgtgtgtgtgtgtgtatatatatatatatatatatatatatatcatacacaataataacaagttttaaaataggcaatagagcttattttgctgtgaagattttcataggtttattaatcatttgaaccaggaattttcttttggaaagtcgaaatgtatcaatataccatatatagatacatatatatggagagagaaagatgatatatgcgtatataattgtatatatataatgtatgcacaataataacaaagagtcataccatgagattctagagaacagaggacaacttgtgtggagttggttctctccttctacctttacatgggatcaagagacaaaacccaggtcattgagcttgcagggaaagtgtttttacccacagagacacctctccagcttatgcactataaaatctacttttagtacaaaaataatagttttaatattgagcttcataatctaaattttatttatattgttccttaaaaataaagcacagtgttagttgtgatatgtttcataaaggtgttataatcattgcagtatataattataaaacttaacaatttgaaagggtaagatcatggctcatttagctatttttcttcatgtgacctttcttccagacttcaaaggcaattgtctattcacaacttcctagatagcattagtttttgtgggtgtgtttttttcctgtttgtttgttttttaagacgtggtctcatgtatttaagctggtctctaactcactatataatcaactagtttgcagtcagctagtgaggaaaaacatgttcaacatcacagcatgggtcctagtccattggtgcctgacatgtcccagaaaccaagttggctgtgatgctggcacttgggtctccctcattgggccactgaactgcataaaggccatgttagtaatatagcagttttgcttcaaaacataaattttctgttgaataatttggaaaggtaaattactataatgttttgtggaatttgattttaagcaagtgaaataggttttcagcaattggaacttagccaatacaacttgaactctggggtttcagcctcacatcagcagatcctgtttgtcaggttcccatgtgtctttttgactcttgaatatagcttcctgcactctgttcagaaatcattcttgagtatgtgttgtgcactccatggacatgctgtgtaagctcttccttgagtaatggactctaagttatttttaatcagtggctataagaagctgaaaatgaatagacttccctctgaatatagatctgttctcaatcagaaaggaaggcaagtagaagctcagtcagcggtatagttcagtctggcttagctgtgccaggcaacccgtctactgttcttgtcacttatgtacagtaaacagagtatgcacttccttggaaagacccccaaaatctggggagaaggctgagttcaagtggataggaaaaaagataatggaaagcagctaggtcaagatgcagtgggtcgagtggctagactcatatatttgaagttggggcggcttctgtgatgtgcatccagcagacgggacctgaaaccagcatctgagtcctggaaagcgatgcaagaacaatcatttaggaaatgttgttctgacagccagagaatgtggtgtcagttcttgtttggggcagagcaccttcaaagggcttgggaaagaaacagcaagcacaacatggccatgaaagccactttattttggtctccccaggaacagagcagcaggaagcttgagctcccatattctcactcttataaaattggggcattctggctggttatgtttccatctgcttttaaactctagttcccctagatgcttctgagttcgagactatgccctttcccacaaggctgcacctcttcttacagagtagataaaagagagcctggatgacaaactagctccttgtatatacatattcagcacctgcttacagacagacacacttgtacagaggaacactgtgggtggtcctcgggggtgactgggaggtggcctcctcttgctctcattgcctgggtgaacacagtgagttcctgccctgtggaatgtggaagacagcttagggtgacctgagagtttcagatcttttttagtcaagaatctcatgttcactttatgtttgtcatttttttaaataccaattattctttactctactatgaaaatattggttctcttcatgaaaactgtagaagactcaaccaaagtctgtagacgcatgtgccaggtgccctataacatcgtaacagaccacctatagccaatacaggtatagacacaaaaagtatagacataaagacactggtctgatattaccaaatgcatttccttccattcaaattttactattaattttttatttcaggaaatctagtatgtagagaaattgaatgctgtttagaagagtatgaacttttaaaaaacaaatatgtaccctgtttgtaatttttatcagtttaaattattgtaactaaatccaaaatctactcgagaaaaatcggtgaagttagtacacgtcaattgaaaaggaaggctacctacagactgagtttcattacctattagacttgaatccaagtaaagtcaatactatactttggcttctggtcttacagtgaaacgtgggctcagatgggttcagtcagtaaaatttctataatctagccattgattctaatgtaggctgataaacattcctatagtgatttcagaactcagggtgtttgtggtcacatagtcgtcagaaggtacaactggatgacagagaaggtttgcctgcccacctggttctctgacctagtcagttctatcccccactgactggctgatatcactcccagcctgatgatacagcagcccaaggctcttttcaccttctgtgttcttgcattatgactctttccctacatgtctgatagacgttcaatggataaacttttaattacaatttgtatggtatgttttgattataccctccccaaatccttctggatcctccccaccttcctacccagccaactttgttttttctttctcattcttactttcaaaaatagaaagaaataacaggaaacaaaaagagggggaaaccccacaaaaacaaaaatcaaaacaaacaggcaaaaggccaataaggcaaaaaagtgtgcactacaacaacgcaaaatgaagcaaaattccacaaaactaccattaagtttgttcacctctgaggacatggctggccttggagtgtggttaattcccagtgacactccactagagaaaattgattttccctttgatattctttgtgaccagcttcttagttaacagtgggacctgatgtctacatccccctttcagtactgagatcccttctgacttgagcctatctgggtctgtgcctgatgccacaatctctatgagttcatatgtgtattagtccaatgtgtctgaagaatttcctaggtattatccatccattctggctcttacaatctttctgcctgctgttctggatagctccatgagccctggggtgagggatttaataaagacatcccctttaggactgagtgctccaaagcctctcactctctgaacattgtccagttgtaggtctctgtggttaattcctatctgctgcaagaaattctctaatgtggttgagtgaaacactgatctatggatatagcagtatatcataacgagtcatgtatttctatcttccttgagcagaataatagttgtaggcttttccctaggctagtcacctgtctagtttcaggttcttgccaactttggcagtgttaggtatgggccccatctcatggagagggccttaattacatccagtcaaaaagtggttggtcagcatcctctgccactcttacagcaccatgcatgcaggcaggctgatttgtagatggggatttgtagctggatggcagtgatgattggctttctcctccaggagcatgcagagtacaaccacccagtaccatgaacactcgccaccagcactgaagctcagagctgggcaccagctcagactctctgtggttgataacatacgtgttttcttcagcaacagagacttcccatcaaattgtgggaagtattaactagactacgatgtttggggggctccattggacacctttggccaatagactgtaaaggatgtagccaattcctggcactgaagttttacttggtggcataagatgtctggtcagagtattggtgcatatcatgtggtgactccatttagagtcctttcatgtttgtctaccttttagaaggcttctataagtaataggcttgcaaatggttttcacatggcctttggtgttaggtgtcccataccacattccctcctttgccctttctttccagtccctctctcatctaaccctcctagtctcccttttatcttttaataacactgtactctttttcccgtgctgtggaagatcccctccccccactgatctcttactaggtacatgacgtctgtggttattcagagtgaaacacgcaaacctaaagtttaaaagctagcatccacatgtaagaggaagcatataacatttgcccttttggttctgggttacttccctcaagatgactgtttcctaatgacgttcatttacctaaaattctataatttcctttcccttaacagctgaatcattttccattgtgggaatgttccaccttttcattatccattattagttggtggctatctaggctttttccaattatgagtagagctacaatgaacatgggtgaccgggtatctctgtagtagggtgtgcagtcctttgggtatgtgccccagagtggtatagttggatcttaaggtagatctgttcccagcttcctgaggaactgcctcactggtttccatagtggctgtacaagtctgcactcccaccatgcatgaggaaggattctttttgcccatatctttgctttatgctgtcatttattttgttgatcttggctgttttgtctggtgtcctagtagctgatagctaaggaagccaacttttttatgtcttttttatgtctgtctaggctttgtgttgcatcttttgaaaactctggttagttctatttcccaatttttaaattgggttatttgttttcttattgtccaggtttgtttttgtttttaaagttctgtgtcttccttgtcttttgttttacattaagaaggtccttggggttcatgttaatgagggcattataaccctgaagatccaagcgggcacaaatacaaaccatgggaaaaggcttaagattttttcagctaatcctttatcttaagtgcagaagtaaaccttaatggaaaagattaattgtggagtcaaaaaaagtgaaaacagtttatgtagccaagaccttaaatgtctgtggcagagcagtaggcaactgcctttttattgaccagtgctcatctgcagaacacaggatgtggaacctacagcctccccagatcgtttttcttgtttccatcagtgtgtagatctgagctgtaatgagctgagtgaaatcacgttaccagaaaacctgccacctaagctgcaggagctagacctgactggaaatccacgccttgccctggaccacaaaagcctggagctgctcaagtgagtattgcaaagcatgtggtccctcatgtgttcacttgcagtggggtttacaacttcatagacatttgaacagggagattcttttgacttagtagccatatacacagacagaaagtaggcagaaagagggtaccatccatggtgggaacataagtcacaatgagccctggtcacatgactgtgatgcctaatgcagatgtcattgaaacattttgaaagagagacatgatgtgaaggaagttattagaaactaaaatctggttccttttttaaagaacaactggtaatgcaaagtagttacaattcgatcttaaggagttttcatccttctcaagggagttcaggatggatgttggtagtgtgactggttgaagtttaagggtagcctcactagagaagatgccactgtctgaatattcattccagaactccaaaatagttaatataactggatgatttgtgtttcacagatactttacagccattagcattctgatgtcaagatgcagaagtaatcagaaaggtctttatagtgtgatattatacaaaggaaacttgtgaaaagatttgtacacatgttattcttttttccaaaagaaatatgcacacattctgcctgtgagtacctgcacatgcctaaagcacactccacaggataggttccaggtattaaaggtgctcctattctcctttaagtagtaggattttgagagggatctctgctttctcctttgtacttctcagaccttgcattcttaaatggtggcccagtgtagtcattgtttctgccatatattcttatatgcagatggattttttttttctggaagtcatctgacatatgttagccaaaaaactgaaaagatgagaattttggtgaatggaccattactaatctttttgggtaacacaaatcaaagcttaaagaccaactttttggctagaattcatctggtctaattaatgcttacttgctggctttttaaatacttaatagaaaactaacttggtgtataactgaagaatgctgcctaaacaaagagtcccaaggaagccatagggacctgatttttcttcactgtgtatgtggtacagcctcaatccctcagtccacagactgcagtcttccgcatgtcctgtaagctgctgggatggctggcattatccctcagatactcaacagcgaagagtaccatgaaatagctacatataaagaatttgatcaatgcctggcatgatacctcagagacaagaggattgccatgagttcaaggtcagctgaggctacacagtgatttataggactcccttagctatacagtgagaaaacctgtttccaagagataccaaaaaaaaaaaaaaaaaaaaaagtatcaagaattctctatggattagctatttagagaaaaattataccaaataaatttcaggtagattaaaaagttaaatatgtaaaataaaataatttgaatgtattcataagctagaaattattttttatgtcagaaatagttgagggacttgccgtgaaatcagtatatgtgactaacacacacacaaattttacatgcatttttatcaactcctacaactactaaaagtaaatctaaaacaaaaattacaactgggaaaaaatacttgaaaaactaatttaaagcactgacattattagtggatagtactcttgtgagtaaagactgtccccacttggctggaaagacagcggagtagttaggagtgtatgctgtttctgcagaggagcaggagagccgatgacatcagcagacacctgcacacatgctagctaatgcatgtgcacagaaacagacttacaaataagtcttctctttttcaaaaaatgttttcattcaaaaatagaaaacgagccaacgacattaatagttaacaaaagaaatccaaaatgttaaagcttattagtatattaagaaaaaacaaatattcaaacacttcagattggctctatgacagaagcagggcttagtatggagttctttaaaagtggccaactcgttctatcaggactttgaaaacagtcatgtaggttaggggtttgtatactaaaactctttttccttcattttttctgtctgttttttttttgtttgtttgtttgtttgttttttttttaaccctcaacctccaacctctccctgtggttccttctagatgcactcataccttccaatccctgaaactctctggggtttaaataactcatccactcggataagcccaggtgtggggccatcccctggaatgtggtcagcctgccatcctgtcaaagaaaactgactttccccgagaagtctcaactgttcatagatcctcagttcacactttcatttcagaaagcagctaatgtttattttaagtacagagataatcatcaggatatgtccagttatatttgcattgaatataaagtaacttgaaaaaatttgtgtcagaatatagacatatatgttgaacatagaaaaatatgctgaaccactatagatgatataaatgcaagatgatagatagatagatagatagatagatagataggtaggtagatgaatgatagatagatagatagatagacagacagacagacagacagatgatagataaggggtcccacagttatatttgcataaatgaaatctggtaagtgtctacagtgagcatatgttatgagagtgactggccttctgtggtgaaggcgttgtgcactcagacttaaaaattaattactaaggatgaatcataatactgaaaatgctaccttccggttataccccagagtcttcttagtaactccggagagtttccacatgcttctgtgactagggttgtgcttgtccaggaactggagtgaatccattcgggaactctccagggctcagtccctttccagatgtcagcgtggtagacagtccacacagccatcttcttgggaggctacttagttacctagttagctagacaggcaattgcttcattacaaaagatttttgaatgaggcagaaacactagtattttttgtataactatttgaaaatggaattatttctgtgaaaattctttgatctataaagattatctgtctgtggaagggcaccattagtaagtagtcattagctgagagagaacccaaatctcacatcttaaaacatggagtgaactagtaattcattaatgtaattttacatgtctcttgtgtggcttgtactcctaatgaagacactgaaagacggagggagtggtgaagcctcagtgatgtgcgttggctatttaaatacatggcatggacaggattgggtttgtagtgaatgccaaagacatcacacagctatgaatttgctcttttcaagtttgagtgcccagttcatggtgtaagaattataagctaacatgacacttaatttctgtttgcttttaagtttagttttatgtatatctgtacttcatattagtgttagtgtttgtgcaggtactcacagaagccataggtcaccctggttcctcaggagtcatgcactttttttctttttaattgagacagggtctctcactggggtctgggactcaccattaggctaggctggctgaccaggggtcctgtgtctatcttgtcagtgctggcattgcaactttttatgaagactctaggggttaaatttaatttctgggcttgcactttcccacctgagccatccccctgctctcttaagttgtattgtttactcacattgtgtggatatgtagtgtacagtctgccaatatctaactgatgctctgcagtcactgtgaaaacagtctttgtgccacagccacacccttgttctcattatcagtgtaaggcacctgaggagcaggttcctgatgcccgtaaatatttcattcactcgacacagcagaggtggaaagtggggagtgcttagcagtgtcctctctcaggtaaaggcagcagatctccctcggctgtccctaacgattcctgcggctctttttgcccatagtaacattcgctgcttcaagattgaccagccgtcagcaggagatgcatcaggagccccagcagtatggagtcatggttacactgaagcatcgggagtaaaaaacaagtatgttgtgtgaaactttggactcaaaaatgcccactgtatgcctcttttcttgggtaggagacttgcacccttgggtatgatggtgcatccttgtgttctgtggagtttcttagagcatgtttctgcagagtgaggctcactcctcaatgtttaagcaccaggctgaggaccttcttggcatcacatactctctttttgttagagatgttgctaggatacagtgtaactgacacattatatctatgtaagcctccagtgtttggaaaaggcctaagtattgaaatgtatctcggctcctttgaaaagccctttatctttctgggaagtctgtttaccaagagagaaatagctgattgtctatactcaagatcacttacattgctgactgtaatatgcctacattctcaactagcttggcagcctttgatctcaattccctgtcatggcatctgcttctgcctctagtagcgattcattggaatttcttttaataaacggttttcaccagtcaccttcctttagctatgaatgcagattttcctgataatgcaatcaagctgatcagacttgctcacattgtatgaaagaggtactgatgattagaaaagcagagacctataaattagagtagtcataatttctttggctaaggtacaagaacgcaaagtattgagagtaatgaatgaatacaaagtggaaagtgatccaataataagcttgttaaatcatgggcatagttagaaccagtcagataaagcaacattcccatacaggcctataattcccagatagtgcccaagtccagaagcatggagctccccctggagctggtgttacagggggtcctgagccccaccagctgtgcttggtggcagctaaactccagttgtctacaaaagcagtttgtattccaactgctgaaccatctttccagctttggttatttctaataaccatggtcttgtatttctaagataaactccacaagtttatcatatattgatatttccttatgctttggaattccatttgctggtaagttgtagaagatgcctgtgttccatgatgaatgttgatctgcattttcgcacgtcacttcctggttttgatgccacagtaacaccagcttcagagattttgaagtttgtacagagtgaactttagatcctccttaaatgtttagaggacaataccagccactgggtttggaattttcttgtgtttttcatcaaacatttcatttagcatatgagctattttctttagtatctgctcttaaatgaatttagtaatttatacatttcaaggaatttgtctattttatttccttttcaaatgtgttggatcttgaggtagatagattccaagctttccgaggaaccagcacactgatttcatagtgactgtaacattgcattcccactgtcagtgagcaagtgtttctcagtcatttgcattttctcttttgagaactgtctgtcaagttctgtaccctattttttgtttttgttgttgttgttttcttgatgtacaattcttttagttctttatatatttagatagtaaccatctattggatgtgtcgttgataaagctcttttctcattctggaacctgccagtttgtttgaataatgttgtcccttgccatatagaagcttttcagtttcatgaggtcccatttggtaattgttcttactgcttgtgctatgttctattcaggaagctgcctcctgagttcaagactttcccccagaagaataatctgaagttttctttgatcagattcagggtatctggcattatgttcaggtctctgatcagtttggagttcagttttgtgtccagtgataaatatgggtatattcccactcttctacctgagccattcagtctgaccagcaccatttgctgcagatgctgtctttgctccagcgtgtatttttggcttgtcaaaaaataaaaaataatctggtatcatcaatccgattccatataatgctattttcgttactatagttctttggtacaacttgaaatctgggatggtgatactttaagtggttctttcattattcaagattgttttagctgtcctagggttgtgtgtgtgtgtgtgtgtgtgtgtgtgtgtgtgttttatatgaagctaaaaatttctttttatttctatgaagaattatgttggaattttgataggaattgtgttgaatctgtaggctggttatggaggatggccattttcactatattaattctaccatccctgggctaggagatctctccacctcctgatacctgcttcagattctttcttcagtttcttaaaggttttatgattactagtccttcccttgcttggttagaattatccatatacataagtgtgagtgtgtgtgtgtgtgtgtgtgtgtgtgtgtgtgtgtgtgtgttgaggttaatgtaaaatgtattatttcccagatttctttctcagtctatcatttgcatttagtaaggcttctagtttttgtctgttaattttatatcctgctacattgcttaaaaatgtttctaatctatagaagtttccaggtggattttaagggtcttttcaatttaaagctgtatcatctgcaaataaaaatatttggcttcttctttccccaaatttttcattttcagtttgggttttccttggtgattctatttctgctctcatgtcttgaaatggtttcattatgcattccactgtgtattttcacagccttcctggggtgatttatccatgtcctctttaaggtccttgaacatattcatggtacctattttgaaatccttgtcttgtgcttcatttcccagggcctcctgtagcaggctttctgggctctggtgaaagcattccatcttggtgttcttgtttgtggttttccactggtgtccaggcatctggaattaggatgactgaggtgattctgggtgctgatatctggtcctgtctttgttggacaggacattctgttccttggtttctgctgccctctctggatcttaggaacgtgtatggctgtaggttccctggtagagaatacttctgaaggtcatcgagtggccaaaagtaatagagatgagcttgaaataaagccaagaatggctgtgggaaagagctaaggtatcctgtccacatccagaggtgggatccccagggaggatgggcaagtaggctgcagtagaaaaggctatgtctggagagtcagggatggtcagactaggaggaccctgggtcagaacaagagctgggtagagttgaggtgcaaaggggtacctgcaagctgtaatcaggctgctacaggactgagggtgagaataaaaacagctaagctaggtacagggaatggaggtaagttgatggagggtgggagaggctgttacagggctggggtgaaagtgatgaagagtaatgtaggaggcctcctgaatcccagtcacatgtagcctctgagtcccaggtagcaagtgttcctaggtacctggctagaaggtagtatgctgtgtttaacttttgtactttaaacctattttcctctttgtattttaaatgctcttttttatagtcatcatgtagtcatatcttgcttttttatctggtttgatttttctgggtttgaaggtaatttttaggtcttttatgtatatctagtgaagatagcttaagtttagatttcaacttactatttgtttattctttgttttctttcttgcttatgtttgtttgcttgttttcaagacagggtttctctgtgtaacagagccatggctctcctagaactctatttgtaagtcagggtagccttgagtttacaagatctgcctgcctctgcttcccaagtgctggtattaatatgtgtgccaccatgcccggcttgtattgcttagagtgtgtattgcttagagtgtgtgtgtgtttgtgtgtgtgtgcgtgcatgcgtgcgtgtgtgcgcttgagcacatgtctttatacaataatcttttacttattacagcttacctccaatcacttcacaacattagaaacatctcaatttctccttcatctacctgtatattatattgccttgtgttttcctttctaattttttttaatattccaaaatgaactgctagcattttagcttagtcttctgctttctgaagtagtgtttctcagcatcaataccataggcagtttgagccagctataacacagcagaggaggagacatcctatttattgtggggtgtgagcaacatctcttgctttatgtatgcacagtcccactgtggcaagaaaacacgtctttcccacttgtcattacagtgtactttattgttctgcagagatcagatctcctttgtcctgctctttgtgtttctgcagtgaagtgttcaggtgggatgctctttattgtgtgtctgaaatgtcatcagccatcactttcccaggctgctcttcgctggctgggaatctagactgtacgtagtacttgacagaagcccttctgcagtcatgtcctttgtggttttgccacaagccgtctgcttccatgcgtgcctctgtaccgcaccctgcctccctccttcgtggtttttagtgatttgattctgttgtgccttagtcagtcttttctgtcgctcttgctgtagagctcttgttgagcttctgtagccacaggtgtatagcagttgtagctataatgtgtaaagttcctgcgtgtcttttcgaggctcgtgctggcccctatattaaactgtttggttccatcccccacactctagtgctgactcttccttcccactctgtttcccttggctcttgtttggtggttccttggtctttcctgtgcttcaggctgactttgaactcctgcttctctcacttcagcctttcaagtgctaggatcacagtccttcgtcactgtgcctggcttcttgggtttattttggagacagatcctgccttctagagcccaatggcctggtgttccccatcagacactgtgtcttctcctgtagcctctgtactttcccaaggaattaacagggccgtcagcagcagctggatgctggagctccccacattgtacttgccactccttctaatgtggctgttctccttaataattgtatgattgtgtaagttagatgttatatcctaatattatttctcatgtctcttactctcctttcttcattgccattaaaggtaaaattggaactggagaaatgacccagcagttaagagcatctatgttccctttgcagatgggtcaagctcagttcccagtttgacttccagcccccatgtcaggccactgaaagcagctgtagctgcagttggggcaagggtctgaagcctctagtcccacaggcatctggacacatatgcacaaccctcacccccacctcatacacatagttaaaatgagtgcttttaaaaatgtaaaactagggtctgaagagatggctctagttaagagctcatgctgctcttgccaaggacctcggttcagttctagcacctggcagctcacaaccacctagaactccagacaacaggcaaaacattcacaaatgtaacacttgaaaataaagaactaaaatttttaaactttaaaatcattttaagagtactaaaactggaggagaagggtgagagatggtattagtcagtgatgcagacagtccaggctctgttcacccaacctcctggagacagggtggaaaagacagaccagaacattgagggagagaaggaggaagggagggagggagggagggagggagggagggagggagggagggagggagggagggagggagggaaagagaataaatgagttatgtcgagcataagaaggaaaagatgaatgggctcatcacaaaagtgtttttactctgcaggctgtgtgtcgcagccctgtctgtaaataacttccgtgacaaccgagaggccctctatggtgtgtttgatggagaccggaatgtggaggtgccctaccttctccagtgcaccatgagtgacattttggctgaagagcttcagaaaacgaaaaatgaagaagaatacatggtcaatacattcatagtcatgcaaaggtaaatggctatttcctccttcccctccatctcctcctcttcctcctctttttcttcctcctctccctccgcctcctcctctgcctccgcctcctcctcctattttatttatttattcttgctcttgtttgatgcttctctcttactagaaaagctggtgccttgtgatcacagtgcacatgtggctgagtgctgcagctgctctcaggcttcactgtcagggatggactgtgcttcagtttccaatgcacggatactcctccttaagtcagtgacagagatctcatttctcacagaactgagcgttagtggcctctgttggtaacattttcatcgtttacaatacccagcctcccccaaccagaggaacaccataggctccttagattgtctcatgtgggatatggaattttctctggaatgcatcatttttctcccagtttgttggccataggaaatgctttcactggtttgaaactgaatgggtcagattttagacttgttttaaaccattgttgtatgctaccctctttcccttattcagtattgatgtaagtattgctaacttctgggctgctacctccctcttactgtgcctgcaccagagcttcaggtcactgcaagaactagcccatgccacttgagctctcagggtcatgtgctacgagggttccttcagtcaaaaattttcattcttttgtcaccttgtgggctttatggattgtaaaggaattgcctactgaagagcagaccctgctcttataagatcgatggtgatgaatatcctagtcctttgacggttatggcagcattgatgagctctctcctttacttcctctccccacgggtaacctgacagagatgatggctgggtaccaaaatagacagtatctacctgctgtggaatgctgccctgagcagcctccacagttatgtctgcctcacgcacagccaaggcaggcaggtttctggctcttgcttccaatgctccccttatctgccaagttcctagtgggtgcagacagcagttgactagcaaatagtcattgttctaactaccttatatgtcctgatgttcccccaatgagatatgcattgctgctcttcatatcttgtttgtgaaaccaaactgcatagaggtgaagcaaagtaccccccaggcccagtacaggcagaatcctgagaccccatggatgctctggccaccagacatagtaacttggctgctttcagccacctccttgtccctgaagtcaggaaatatgatacacacagacaaagatgcacacatatacacataccatgtatatgtgtacacacacacacacacacacacacaccatccacataggcctctagcctacaaatttctcaccagtcgttgtgcatttgaaagtcatgctgccttagaagcatgcaccagtcagatatggtcgtggaatcctatgacaggccgacctgcagtgtcgtctttgtgacttttgtctgttagttaacaggttataagaccaggcagcacttcagtccttagagtaactgcctattcattgtgcctagctctcaagggtgtgtggctaggtgtccctggtttccgtcgcttctgtccccagttgtctaacttatattctgacaatgcttcagagtctttcctgccctcattaggcaagagaggcagtttttcctttttgtttctgtttttttatgactgtcattatgggaagtttggaggaatgaccattggttggacatgtgatgagagttctttgctctttatgatggtcagtatttataggggctccaaatattcaataagtacacaggttaattgacagcggaggataaggcaaaaacacttggtgtttgatgccagaatggtgtcctatagctgtcatagaacaaatagtgctgatcaagagagtctcggctggagctggagagatggctcagcggtctatactcctcttcaagaggacctgagttcaattcccagcaaccacatggtggctcacaaccatctgtaatgggatccgatgaactcttctggtgtgtctgaagacagctacagtgtactcatattaaatagatagatagatagatagatagatagatagatagatagatagatagatagatagacagacaaataaataaataaataaatctatcttttaaaaaaagaaagtcttggctgcatggacaagaatggcagtgaacatcctctagaagaatggtgattctagcttatcatacttttatttgttgagttttgttgttatctcttagaagcctgttcttttctaatgagaaacagaatgagagtggatataaatgggaagggaaggagagaagaactgggagaagtagagggaggagaaactgtaatcgggatatagtacaggagaaaagaatctattttcagtaaacgaggagaaaatgaaaataaataaataaaagactttttctaaattctcagtgctacactgagtgtagtcccaccagtctggaataaagactttgtagtcccaccagtctggaataaagacttctaatagatagatagatagatagatagatagatagatagatagatagatagatagatagatagatacttctgatagatagatagatagatagatagatagatagatagatagatagatagatagatagatagatagatagatagacagacagacagacagacagacagacagacagacagacagatagaatggtggttaggataagtgtgcagttcatgcatagatactgtgtttgtacctattcagatttttgtgggaatagaggatttggaaaagtgagtgggaaaagaagcagccctttcttgatggtttggaatatagtgctgggctgtataactgatgcagggcagcaggctagacacaacaggccaggaccagcaaaacggcttttaatcaaaaggtgatccttccctaccatatatgagcagatacctctctatgtgaatgtgtgtagtgtcagattccagggacctttttcttcttggaagctgagtggctttgctggacaggactaagtctaatctatggccctgtaccctgtgtcatctttcttctgaatggacaaaatgtggtaaggtgtttgagtgttcacccttctctttgggttcaggaaactgggaactgctgggcagaaacttggtggtgctgctgtcctctgccacatcaagcctgaccctgtggacctgggaggatcctttaccctgacctctgctaatgttggcaagtgccaaacggttctctgtcgaaatgggaagccactgtctctgtccaggtcatacatcatgagctgtgaagaagagcggaagaggattaagcagcacaaagccatcatcactgaggtgaggagccagttttcctcagacagcaggagaacatgagcagcaccccctggtggagacccctcgggaaacacttgtcttcagaggaaacttgatgttagttcagatgtagctttccaagtccatggtattacaaagtaaattccttggtgctgtctttagattactgaggaatatctctatggcttattatagaataataaggcagtcatcagttgcatagagttgggaatgcttcctgggaactgtcccagtggatctcagagctactggctaagtggctgagaactggactcctgaatcacacttctgctttgtatctcagctatgtataaagtagatatcagacacctgccttgctttacaatggtagtctggcacaataactgtggtgtctgtataactatataactattttctgttttgccagttgaataatactgttctcagggacaggaggcaaaaatacaaggcctatagatatatttgatcatcaaaatcagcgcatgattgccatagagagaggagaagctagatctatggctaaagaggttacagtgtgggcatagtcccacaacaaagatttacctggtcccaaatggcaataaaaaaataaaaaaaaattgctgttttaaaacaaaaaacaaacaaaaccagctagaataacagtagagcatgatccattgtcaatgaatcttgaaaactagcttctgcagttctttatttgctaatttaccagcatgtcagtcactcaacattacctggaagtacccatacacatctgctgacaagaacctaacctcctcttagcagtaaaactcacagaacaatgtactgtctgaaggtgagagggaaggggagtgtccagaagagaaaaagaggctatgttgagcatcccagaaagacaccaaggtgccgtgagtccttggacgtgagcacacatataaattgagttccctgtctgtcccagcactgaaggttaaagtggatgttgagcacaggttaggagagtgggcactgtactgctgtccagaagagtgagctgagcggcaacactgtagagaaaaagatgtctgccacatgcgtcagagttcgtaggtcagttgtgttatcccctttcctcccctgcttctcttcctgacttctgcttgctctgctcagtcttcaacagtgactagttctcacaccaccccttccgttccttgaagatgccctcaaagcacaaactggggagaaggctgaagggtggctagagtagccagcccccacaccaggcagggcggatttcattactagagtcaagggtgtttcaaactgcttgaaaggctgttttactcatcttagttcctaggctgccccctggtctaagcatggctgctgaggtctctttggaaaggcacccaggaacaagcagataactcgggaagcacaggaggaggcaggcactgagcggaagcacggggcattctcttgaagaagcactgtttgtgagtccagagactcacaaaagttgtatccgccattgcagaaccttgtgtggcaggaagtgttagaagtaggagagtgggggtggatgtggctgtaaggcagagatcctcacacctggaaggtagagaacacagcagctgcatgtagctaagatttaaaagtactcatcttttcccccagcaaatggcctggatttggctgctggtctaaatagaaccaactgtctaagactgggcaccatggtttctacatttgtccttgtaagtcaggttcaagaaaggcctaaggatgggtacttctgttagcattgcctctccaaacatgtgagcactgtgactcagatacagacatccgtgggtcacaacagactgactccctagcccttttccatgctgattgtgctgctggacagtcatgaggttggactgtacctaccctgggtgtttctatgggacttacctctctagaatctaataagcatgcatgccatgtgaggctgtacatcagcttgtcatgaagagacataccatttagtataaatgcagtccctgttaaagggatggctgaaatacttctttttgttcctctacacttcagcctttccatatagggtgtgtgagcctccttcgtgggatgcccaacaccgtcctgtgacccagtcagtggcccagagggaggctgctcagtaaccacatgtgctctgtgctcactgtctctttggaaatttttcttgtaggatggcaaggtcaatggagtgacagagtccacgcgcatcctgggctacaccttcctccatcccagtgtggtgcctcgcccccatgtgcagtcggtgcttctgactccacaggatgagtttttcatcctgggcagcaaagggctgtgggacagcctatccattgacgaggctgtggaagctgtacgcaatgtgccagatgctctggctgctgctaagaagctctgcaccctggctcagagctatggctgccatgacagcatcagtgctgtggtggtacagctaagtgtcaccgaagacagcttctgctgctgtgagctcagtgctggagggagcatgccaccacccagccccggaatcttcccaccatccgtcaacatggtcatcaaggaccgaccctcagatgggctgggtgtgccatcctccagcagtggcatggcatctgagatcagcagtgaactgtctacctccgagatgagtagtgaggtgggctccacagcctctgatgagcccccgtctggagtcctgaatgagagcagccctgcctaccccaacgagcagcgctgcatgctccaccctgtctgcctgtctaactccttccaacgtcagctgtccagcgctactttctccagcgcgttctctgacaacggccttgacagtgacgatgaagaacccattgagggggtgttcagcaacggcagccgggttgaggtggaagtagacatccactgcagcagggccaaggaaaaggagagacagcagcacctacttcaggtgccagctgaggccagtgatgagggcattgtcatcagtgccaatgaggatgagtcaggtctgtccaagaaggcagacttttctgctgtgggaaccattggacgacgcagggctaatggctctgtagctccccaggaaaggagccataatgtgatagaggttgctgcagatgcgcctctccggaagccaggaggctattttgcagcccctgctcagccagatccagatgatcagtttatcatccccccagagctggaagaggaagtcaaagaaatcatgaaacatcaccaggagcagcagcagcagcagcagcagcagcagctgccaccaccaccccagccgccacagccacagccacagccacagccacagcggcacttccaaatggatcacctgccagactgttacgatacaccgctatgacccagcctgagtactgttttaaacaataaactaaccagagagactgagagtctcccaggctcacattaaaccaggggtgttaacttcatgccctctcccagacactgccccacctgtctctgcagctcatctgtaggttctctttgtattggttacttttaacaattaaccacttttcttctagtgatactttaccaatatgatttaaatttgttaacttctttccctaacatatcaactgtgtaaagacaaagaacaaaaggtttaatatattacagagaaacagttaatgataatgtaatatttttaaaaatggcttttgttgttttgtttgtttggaaggcagggcaagttgccattgctaaatgatttaataatattgtaattgtgtatttctttgtggggaaagcttttttttgtcttgaaaatggtagacatttgtagaatatggcgactaactcctaggagttgctttactctgtcaggtgacttaagtcactgggagtcactaattttctctgagagaacagttgattgagaaatttctattgtaaatatctcagtgttacatagtgaagcttaaagtgtttgtagtcttgcataaggacacagcctaaataactgaccccttactcgctctgaagagcctccctgccccacccctacgtagctcatcttcagtgtgggccatgtgcagcgtgtttctgtgcagataatgtggccctgttctcgggaacccagaaccttttacagacattttttaattgtgttccttcctgctgccacaatcagcatgactgtatagagtcccttataccatctacacatccagagttatatggaagcagaatgcccaaatggacatgtcgtaatttttgttataataaatatgaaatttacaagta

SEQ ID NO: 181 - DNA, 5063 bp, Mus Musculus
cctctggagcggccgcgccgaacgccatcggcgtctccgttctcttcgcgccgccgccgccgccgtctcccaccttcgcctcacctcctcctcctccgctgcctccggagctgggggagcggcggcggcggctcctcgtcgtcgtcggaggagttagaggctgatccggccatgccccaccgccccggccgccccgcgcagcctcggccgccttccccgaagacctcggctttactgcagccgaaagccccgacgggcgtagacagcactggcgtgatagcgggcgagggtcccggagacgataaggcgatggcagccgcagctccggacgttcctctgtcgacttcggggaggatacgggagaccgtgcaaaagacatctccgccctccctgtatgtacagctccatggagagactacccggcgcctggaggcggacgagaagccattgcagatccaaaatgactacctcttccaactgggatttggggagctgtggagggtgcaggaggaaggcatggactcagagattggctgtctcattcgattctatgcaggaaagcctcatagcactgggagctctgagcggattcagctctccggaatgtacaatgtccgaaaaggcaaaatgcagttgccagtgaaccgatggacaagacgacaggtcattctgtgcgggacgtgcttgatagtgtcgtccgtgaaagacagcgtgagtgggaagatgcatgtcctgcccctcattggtggaaaagtggaggaagtgaaaaagcaccagcactgtttagcgttcagctcttcggggcctcaaagccagacttactacatctgctttgatactttcacggagtacttacggtggctgcggcaagtctccaaggttgcatcacagcgtataagctcagtagacctctcctgttgtagccttgaacatctgcctgccaacctcttttacagccaagaccttactcatctcaacttaaaacagaacttcctaaggcaaacccccaccctcccagctgccagaggacttggtgaactgcaaaggttcaccaaattgaagagccttaacctttccaataaccacctaggagcctttccgtcagcagtctgcagcattccaaccctagcagagctgaatgtatcttgcaatgccctgcgagaagtcccagcagctgttggagatatgcagaacttgcagacgtttctgctggatggaaattttctccagtcccttcctgctgaactggagagcatgcaccagctcagctatctgggtctttcctttaatgaattcactgacattccagaggtattggagaagctgactgctgtggataagctgtgtatggctgggaactgtgtggagaccctcagactacaggccttaagaagaatgcctcatattaaacatgtggacctaagactgaacatactcagaaagcttatggcagatgaggtggactttgtgcaacatgtcactcagcttgacctgcgagacaataagcttggtgatctagatgctatgatcttcaacaacatagaagttctgcactgtgagaggaatcagctggtgacattgaacgtttgtggctatttcctaaaggcactctatgcttcttctaatgaacttgctcaacttgatgtctacccagttccgaattatctctcttacatggatgtctcaagaaactgcctagaaagtgtgcctgagtgggtatgtgaaagccggaaattagaagttttggatattggccataatcaaatatgtgaacttcctgcccgcctgttttgtaatagtagtctccggaaattgctagcaggacacaaccggttggcaaggcttcctgaaaggctggagagaacttctgtggaggtcttggatgtccagcacaaccagatcactgagctcccaccaaacctcctcatgaaggctgacagcctgagattcctgaatgcatctgcaaacaaactggaaaccctgcctccagccacactttctgaggagacgagcagtatattacaggagttgtacctgacaaacaactgcctcacggataagtgtgtgcccttgttaacagggcacccccgtctgaagatcctacacatggcctataaccggcttcagagcttcccggcaagtaaaatggcaaaactggaggaacttgaagaaattgatatcagtgggaataagctgaaagccatccccacaacaatcatgaactgcagacgcatgcacaccgtgattgctcactccaattgtatcgaagtctttcctgaagttatgcagctcccagaagtcaagtgtgtagatctgagctgtaatgagctgagtgaaatcacgttaccagaaaacctgccacctaagctgcaggagctagacctgactggaaatccacgccttgccctggaccacaaaagcctggagctgctcaataacattcgctgcttcaagattgaccagccgtcagcaggagatgcatcaggagccccagcagtatggagtcatggttacactgaagcatcgggagtaaaaaacaagctgtgtgtcgcagccctgtctgtaaataacttccgtgacaaccgagaggccctctatggtgtgtttgatggagaccggaatgtggaggtgccctaccttctccagtgcaccatgagtgacattttggctgaagagcttcagaaaacgaaaaatgaagaagaatacatggtcaatacattcatagtcatgcaaaggaaactgggaactgctgggcagaaacttggtggtgctgctgtcctctgccacatcaagcctgaccctgtggacctgggaggatcctttaccctgacctctgctaatgttggcaagtgccaaacggttctctgtcgaaatgggaagccactgtctctgtccaggtcatacatcatgagctgtgaagaagagcggaagaggattaagcagcacaaagccatcatcactgaggatggcaaggtcaatggagtgacagagtccacgcgcatcctgggctacaccttcctccatcccagtgtggtgcctcgcccccatgtgcagtcggtgcttctgactccacaggatgagtttttcatcctgggcagcaaagggctgtgggacagcctatccattgacgaggctgtggaagctgtacgcaatgtgccagatgctctggctgctgctaagaagctctgcaccctggctcagagctatggctgccatgacagcatcagtgctgtggtggtacagctaagtgtcaccgaagacagcttctgctgctgtgagctcagtgctggagggagcatgccaccacccagccccggaatcttcccaccatccgtcaacatggtcatcaaggaccgaccctcagatgggctgggtgtgccatcctccagcagtggcatggcatctgagatcagcagtgaactgtctacctccgagatgagtagtgaggtgggctccacagcctctgatgagcccccgtctggagtcctgaatgagagcagccctgcctaccccaacgagcagcgctgcatgctccaccctgtctgcctgtctaactccttccaacgtcagctgtccagcgctactttctccagcgcgttctctgacaacggccttgacagtgacgatgaagaacccattgagggggtgttcagcaacggcagccgggttgaggtggaagtagacatccactgcagcagggccaaggaaaaggagagacagcagcacctacttcaggtgccagctgaggccagtgatgagggcattgtcatcagtgccaatgaggatgagtcaggtctgtccaagaaggcagacttttctgctgtgggaaccattggacgacgcagggctaatggctctgtagctccccaggaaaggagccataatgtgatagaggttgctgcagatgcgcctctccggaagccaggaggctattttgcagcccctgctcagccagatccagatgatcagtttatcatccccccagagctggaagaggaagtcaaagaaatcatgaaacatcaccaggagcagcagcagcagcagcagcagcagcagctgccaccaccaccccagccgccacagccacagccacagccacagccacagcggcacttccaaatggatcacctgccagactgttacgatacaccgctatgacccagcctgagtactgttttaaacaataaactaaccagagagactgagagtctcccaggctcacattaaaccaggggtgttaacttcatgccctctcccagacactgccccacctgtctctgcagctcatctgtaggttctctttgtattggttacttttaacaattaaccacttttcttctagtgatactttaccaatatgatttaaatttgttaacttctttccctaacatatcaactgtgtaaagacaaagaacaaaaggtttaatatattacagagaaacagttaatgataatgtaatatttttaaaaatggcttttgttgttttgtttgtttggaaggcagggcaagttgccattgctaaatgatttaataatattgtaattgtgtatttctttgtggggaaagcttttttttgtcttgaaaatggtagacatttgtagaatatggcgactaactcctaggagttgctttactctgtcaggtgacttaagtcactgggagtcactaattttctctgagagaacagttgattgagaaatttctattgtaaatatctcagtgttacatagtgaagcttaaagtgtttgtagtcttgcataaggacacagcctaaataactgaccccttactcgctctgaagagcctccctgccccacccctacgtagctcatcttcagtgtgggccatgtgcagcgtgtttctgtgcagataatgtggccctgttctcgggaacccagaaccttttacagacattttttaattgtgttccttcctgctgccacaatcagcatgactgtatagagtcccttataccatctacacatccagagttatatggaagcagaatgcccaaatggacatgtcgtaatttttgttataataaatatgaaatttacaagta

SEQ ID NO: 182 - protein, 1385 aa, Mus Musculus
PLERPRRTPSASPFSSRRRRRRLPPSPHLLLLRCLRSWGSGGGGSSSSSEELEADPAMPHRPGRPAQPRPPSPKTSALLQPKAPTGVDSTGVIAGEGPGDDKAMAAAAPDVPLSTSGRIRETVQKTSPPSLYVQLHGETTRRLEADEKPLQIQNDYLFQLGFGELWRVQEEGMDSEIGCLIRFYAGKPHSTGSSERIQLSGMYNVRKGKMQLPVNRWTRRQVILCGTCLIVSSVKDSVSGKMHVLPLIGGKVEEVKKHQHCLAFSSSGPQSQTYYICFDTFTEYLRWLRQVSKVASQRISSVDLSCCSLEHLPANLFYSQDLTHLNLKQNFLRQTPTLPAARGLGELQRFTKLKSLNLSNNHLGAFPSAVCSIPTLAELNVSCNALREVPAAVGDMQNLQTFLLDGNFLQSLPAELESMHQLSYLGLSFNEFTDIPEVLEKLTAVDKLCMAGNCVETLRLQALRRMPHIKHVDLRLNILRKLMADEVDFVQHVTQLDLRDNKLGDLDAMIFNNIEVLHCERNQLVTLNVCGYFLKALYASSNELAQLDVYPVPNYLSYMDVSRNCLESVPEWVCESRKLEVLDIGHNQICELPARLFCNSSLRKLLAGHNRLARLPERLERTSVEVLDVQHNQITELPPNLLMKADSLRFLNASANKLETLPPATLSEETSSILQELYLTNNCLTDKCVPLLTGHPRLKILHMAYNRLQSFPASKMAKLEELEEIDISGNKLKAIPTTIMNCRRMHTVIAHSNCIEVFPEVMQLPEVKCVDLSCNELSEITLPENLPPKLQELDLTGNPRLALDHKSLELLNNIRCFKIDQPSAGDASGAPAVWSHGYTEASGVKNKLCVAALSVNNFRDNREALYGVFDGDRNVEVPYLLQCTMSDILAEELQKTKNEEEYMVNTFIVMQRKLGTAGQKLGGAAVLCHIKPDPVDLGGSFTLTSANVGKCQTVLCRNGKPLSLSRSYIMSCEEERKRIKQHKAIITEDGKVNGVTESTRILGYTFLHPSVVPRPHVQSVLLTPQDEFFILGSKGLWDSLSIDEAVEAVRNVPDALAAAKKLCTLAQSYGCHDSISAVVVQLSVTEDSFCCCELSAGGSMPPPSPGIFPPSVNMVIKDRPSDGLGVPSSSSGMASEISSELSTSEMSSEVGSTASDEPPSGVLNESSPAYPNEQRCMLHPVCLSNSFQRQLSSATFSSAFSDNGLDSDDEEPIEGVFSNGSRVEVEVDIHCSRAKEKERQQHLLQVPAEASDEGIVISANEDESGLSKKADFSAVGTIGRRRANGSVAPQERSHNVIEVAADAPLRKPGGYFAAPAQPDPDDQFIIPPELEEEVKEIMKHHQEQQQQQQQQQLPPPPQPPQPQPQPQPQRHFQMDHLPDCYDTPL

SEQ ID NO: 183 - DNA, 150397 bp, Homo Sapiens
ataacatgtttgcttctgtttatttcaggaaaacctcacagcacgggtagctctgaacggattcagctctcaggaatgtataatgtccgtaaaggcaagatgcagttgccagtgaaccgatggacaagacgccaagtcatcctatgtgggacctgcctgatagtatcatctgtgaaagacagcttgaccggaaagatgcatgttctgccactaattggtggaaaagtaagtttgtttgtttgtttgtttattgagtcagagtctcactctgtcacccaggctcaagtgtagtggcgtggtctcaactcactgcaacctctgcctcctgagttcaagcgattctcctgcctcagccaggattacaggcgtgcaccaccacacctggctaatttttgtatttttagtagagatggggtttcaccatgttggccaggctggtcttgaactcctgacctcaagtgatctgcccacctcggcctcccaaagtgctgggattacaggtgtgagccaccatgccaggccgaaaagtaagtttaaaacaaacaaaatactaacaggtttcccaccatcagtaaggaccttactttgagccatttctgtgatatggggtagatgattttttactcatctgaggtcttattcagttcctgttgtgggtgttgtcggttggtggagctgtggggaaaaaacagtgccattggctcatgtgaggccttgatgattattgtttcattagttatgtgcattttacctactggacagaaaataggtagaattttattgtcatatgtcagagtttagatgataaattcgttacttatgagttgatatcttaagcatacattttctagtagagtatactcatccttaatttcgtgaatttagaaacattgacacatgcggagggtttgagtctatagtgcttaagtctttgaccacattttcccctatctgtgtttagtgatcagtggggttagcatttttagtttattaagtgcctagttataaattttgaatcttaaatgtttctcatttcggagaaaatgtgatgcaacggatatatttttgacattactgatttctttgctttgggtatgttaactattttattgctattatttataaaatagaaccagattacttggggaaatgttacattattttctttgtcagagttatttataaagtcccaagcattggtaagggtagcatcaccatacttataggtcagtatttcttgatttttaagtgatatgttaataaatggaaattaggatttggatgagaaaatgggtcattgggggcacattgagcaaatattttctttttctttttctttttttttttttgagatggagtcttgctctgtttcccaggctggagtgtggtggtgcaatcccagctcactgcaacctctgcctcccgggttcaagtgattctcctgcctcagcctcccaagtagctgggactacaggcgcatgacaccatatccagctaattttttgtatttttagtagagacagggtttcaccatgttagccaggatggtcttgatctcctgacctcgtgattcacccactttggcctcccagagtgctgagattacaggcatgagccactgtgcctggcctaagtaaaccatttgttaattggttgtctaaatgtctgatctgtttcaagggttgtaagtgaaggaagtaagaccacatgtgtatggtaataaatggttttgttgctcactgctgtgtagcaagcacattcttgtagtctttccttatgaataaatagcctatgttagttttttcctctctattctagtttcaagaaggctaatacttgatcattttcaaaaataggttttggtcaggctgtgcaagatgcgtttagattgattttagtcgttcattttgaaaccaatgctgcttaacttttgtcggagcattgaagagttagtgactgatatactaagattttgccctgtggatggatggattactgaaaaaatactcatctgtattaccactataggttattaaaaatgcatatttaatgtttgatgctttgttaggtcaacagtctctctctttgtgatgctgggtgtttgcataggcaaatctaatataactattcagtatcctctttggggaaggcactgtgcttggcaccccagaaatactaacatagctaaataaccctgcctgcctttgaagagcttatgattttgtatcagaagatgaagtaggcacaatgatatctgttgtaagaaagatgcaggaaggtactgtgggggattaatggaaggagagattacattttttcgggtaagagggaattttgtaatgaaaggtagcaattatgatagaatttgaaggatgaaaagtcttttgacatgtgaaggagatggtcagaaagattattatgcttatagaggcagaggcaggaaagcacatggaatgttcagataaggtcagcagatccggttataattagcattttcattcagtactagagtcttgtcctgtttcccaggtctgttactggatggtcttctaccactgagtgaattgaaagttaatagcttcctcttttcacaagcaaaacttgtaaaacctgttttatactatgcctttaaaaaataattgactacattgaaaaattgagtctttaatatctgttgactgagttagggaaaaataattgatttcttgcaatttgagctttcattaatttttgtctgttgttgtttttttttatcctgttctattgttaaagaaaaaactgagagtatgaatgaaaggagttttattttttctttttaatttagatatagaagagctatagatttagaaataaggtgtgagatagattggtcataacctagttagaattgctgtggtttcataccacgtgagcatggtcattactttacatatatggctttgctgttaaataaaactctcaaaatttagttattgaaagagtatttaatagatacatttatattatgcagttttaatgttgtatttaacttgtcctatagaatttaacatagatttttaaataatgtattattattatttttttaaaaagacagtcttgctttgtcatccaggctggagtgcagtggtgcgatcttgggtcactgcactctctgcctcccgggttcaagcgattctcctgcctcagcctcctgagtagctgggactgcaggtgcacaccaccatgcccggccaatttttgtacttttagtagagacagggtttcaccgtgttggccaggctggtcttgaactcctgatctcaagtgatccgcctgcttcggcctcccatagtgctgggattacaggcgtgagccaccacgcctggccagataatactgtattttaattaatatttgttaaattatgaagtataataaattgaagaattgtcagccactactgaatttaggaactgtggggatatcaataccagagtttcttctacctgtgttctctttacatatatctcattgcctcccctagccctagaaggattcactgtcctagaatgtatattcctcattttttccttttttgaaataagttttaccgtgtatctatattttgcttgtttttgatgtgtataaaagtgataaattgctgtggtcttctgtaattgaatttattcacctaatacaatgtttcataataagattacatgttacttatgtggttttcatttctctataatgtctactgtaaacattccacaattttcataattccttaagtaattttcctgctgatggacatttgggttgctttcagtttgttgttgttataataacaacagtgctgctgctatagtctcatgttgatatgcctcctggtatgcaagtaccttttctaagacagtagtttgcgagtggagttactatgctgaagggacatttggttatatgtaggaatgttttgatggtcagatgattgaacagtgaacattatcagttaatataagcataagtaatgccctggtaacacccctcttttccccccaatcttagtgacttgtcataacagttatttctcacattgtctgttgtgggtcagtggggttggggggtgggcgtttcttttgtcacacagttgttcagggacccagcctgatgaagtcttggctcttttatacttccctttgttgttttggcaagggaagaggtaattggagcatcattcatgggccttgtatgtttggatgcagaagtgacacatgccacttctctctgtggctcattggccagaactagtcacatcgctccaccttaattgcaaggggtctgagaaatgtggagtagatagagtgattggtgaataacattatctttgctgcaggggacactcttggcatttaaaggcagaggcgagagtttaaaatattgtgcaaagtattagagagttctgcataggggacaatgaagaactattcaatccacaattcctataatgatctccttgagaaatactactgttgggtatacactttggagctcggttactgggctctgggacatacacacatctactttcgcaagatgataccaagttgtttttcagggtcgatgtaccattttgcattcacatcagtgtacaagtgttgtttctccacatcttcaccaacactttactgacgtgtaattgacaacaataaactgcacatttcagttttataactgtacactccagttaacacaatttgatagctgtatacccccattaaaccatcacggcaaccaggatagtgaccatgttcattattcccagaagtttcctcgtgtccctttgttctcctttcctcccacccttttattttcctttcctcccaccctctcccactcctctccatccctaagaaaccttttgcttgatatctgtcaatttgtttacacagcattttttaaaaaatcgtattttctgtttggtttatagaaacacagttggtttttgagtattgatcttgagtattgatttatcgtcttgctaaatgttctggtttattctaatatgatgcctgtaggtttttttgtttactgtatagttaatcatataatattcaaatgatgacaggtttcttccttttctttgtcttactgttacgggcaggaagatctagtacagtgttgaatagaaacagtagatacttatcaatgatccttttttttttcctttttttttttgagacagagtctgtctcttgtcacgcaggctggagtgcagtggtgcattcttggttcactgcaacctctgtctcccgggttcaagccattctcctgcctcagcctcccgagtagctgggactacaggcgcatgccaccacacacagctaatttttgtatttttagtagagactgggtttcatcatgttgaccaggctggtcttctgacctcaggtgacccccctgcctcggcctcctaaagtgctgggattacaggtgtgagccaccgcacctggctccttatcaatgatcttgagaatgatatctcatcattaacattgaagtttgctttagatgtttgataaatacccttggtcagtttaagtgagtttttattttctgagtttgctgagaatttttattcttcatttcagcctgaatgaagttactaacagctttttctgcaactgtggggttaatagtatgggtgtctttaatccgttaatgtgattaatggttttatagttctaattacgttaaactgtctttctttatctgaggtaaattcaactggttcttttttttttttttttttttttgaggcggagtcttgctgtgttgcccaggctggagcacactggcacaatatcagctcactgcatcctccacctcccgggttcaagcgattctcctgcctcagcctcctgagtacctgggattacaggcatgcaccaccacgcccgactaatttttgtatttttagtagaagtggggtttcaccatgttggccaggctggtctcaaactcctgacctcaaatgattcgcctgcctcagccttccaaagtattgggattataggggtgagccaccgtgcccggccttgttcttgatacatatatatatttttaaattactgggttttctaaaataaataaataaattaattaattaaaaggctgggaatggtggctgatgtctgtaatcccagcacttgagaggctgaggcgggttgatcacgaggtcaggagttcaagaccagactggccaagatggtgaaaccctgtctttactaaaaatacaaaaattggtggcgcagtggcaggcgcctgtaatcccagttacttgggaggctgaggcaggagaatcgcttgaacctgggaggcagaggttgcagtgagctgagatcgtgccactgcactgcagcctgggcaacagagcgagactccatctaaaaataaataaataaataaataaataaataaataaataaataaataaataaaaataaattactggattttgatgcaacattttgttcaagataaatctttgtgaccatggttacctgtaagtttcctttctgttactgttctcatgtgggtcttggttatactatcctcatagaatgggttggggtgttttccttcatttttttgtttgctggatgagtttgcatgagtttggattgatctattttttgaaactttggtaaaagttacctgtaaagctatatgggcctgattttttttgagacattaaaaaaaaaaaaaacttctatattttaaatggctatataggggccaggcgtggctcatgcctataatcccagcactttgggaggccaaggctgtaatcccatctactcaagaggttgagataggagaatcgcttgcaatcggaaggcggagtttgcagtgagctaagattgcaccactgcactccagcctgggcaaggagtgaaattccgtctcaaaaacaaagttataggactattcaatttttgttttgttttgttaacactggattttactccattgtacaggttggagtgcagtggtatagttactccacactatagccttgacctccccaggcttgggcgatttccccactttagacttctgagtagctataggactacaaggtgtgcgctgccacacccagctaacttttgtttttctgttttttgtagagataaggttttgccatgttgcacaggttgatctccaactcctgggctcaagcgatctgtccctctaggtctcccgaagtgctgggattacaagtgtgagcctgcacctggctgataggactatttaggcttttggtttttctttatttagtagtattggtaaaacatattttttctaagaatttgtcacaaaattgttcataatattctcttcttaatctctggcgaatctgtagctgtgtctccctttttattgttaattgttaatattatttataagtgtctctgctctctttttcttgccagaggatgtatccatttttcttgccagagtatttatcaattgtactagttttcttgaagaatcagtattttgctttgttaatgttttctcttacatatttggttttcatttcaccaattgctagtttttatcatagccttctttcaattttggatttattcaatttggaggtttgattttatttttttccttccaagttttttttttttttggagacagagtcttgctctgtcacccaggctggatctcagctcactgcaacctctgcctcctgggtttaagcgatcctcccacctcagcctccccagtagctgggactacaggcacccaccaccgctcctagctgtaaggttttttttgtatttttagtagagaggggttttaccatgttgaccaggctggtctcgaactcctgacctcaggtgatccacctgcctcggcctcccaaagtggtgggattacaggcgtgagccaccacgcccaggcttccttccaagttcttaaggtgcatgccgagcaaattaatgttctaccttcttttccaatatgactatcaaaagatacacgagttcaattgaaaaaaatatatatatatataaatttccctttgtatatcttcttttattgcaacatacagattttgatatgtagtttttctagaattatttagttctaagcgttttaagattttggttgtaatttctccttgcacctgtgagttgtttagaagtttgttattaagtttccaaacatagaagtttgtataatgttacttttggtgtgtatttttccccttgtgaagaacttacaaggagtggaaatttgatttgactgtatttcactgcatcattaggacttgaaagttctcatggtagggttttattacaggttaatttcagtttaacagtaatgttttcaatacttatttaatatgcttgaagacttcttaagtaaaaattcctaagtaaaatcttaagtaaaaattctaagaggaagtaagaaccccagcaccctattgtgaggttagaagaataagaaagggagtctggactaattttaaacagaaagaggagaatttcactgtggtggggaaatatagtaaagataaaactcccccttttttggtttctttgtaattcaaattgggtgatcatatgcaggaacttagttctcattaatgagtaacatatatagggaaacatgcaaatccatgcaggctccttgatcagaggcatagttagtgaaatacatcagtggttctgctgtctgacttgtttctgcttctctctgtttgcttttataggtagaagaagtgaaaaagcaccaacactgtttagcatttagctcctctggaccccaaagccagacttactacatttgctttgatactttcacagaatacttaaggtggctgcgacaagtctccaaggtaagcaagcacttaatccaggaatccactcagcttctagctggctacaaagttcctttctgctttagctgggtctaaaatatggttagttacacacactttttttttcctccccagatactgccagtgattagcaatttttagttttttaaaaactaattttgcctgaaaagtggctttttaaaaattgttttttacttgcccagtttatacttaaaaataaattggtctgtaaacaggcattactatcttaatgttgtagataaaaaacatgagattgggaatatttgagggactgacccaggctaagacaactataaaaccacaaaatacccagagaattgttacaaatttcccttctttctctgactgttttttcatataaatagtctaatattataccatctccccttcacctttattctgccttttcagtgatttaattttttatcttattttggccattttatattcctctgatttaataagatcaccatgtcccatgaaataatatatagtacttttggccaggcacactggctcactcctgtaatcccagcactttggaaggctgagacaggcagatcacttgagttcaggagtttgagaccagcctggccaaaatggtgaaaccccatctctactaaaaatacaaaaaaattagccaggcatgatggtacgcacctgtagtcccagatacttgggaggctgaggcacgaaaattgcgaactgggaaggtggaggttgcaatgagccgagattgcaccattacactacagccttggtgacagagtgagactctgacttaaaaaaaatatatatatatatgtatatatataatataatatataattatatataatatatattttataatatatatatataatatctagtgcttttgtgtttaatgtaaaccagaatcacattataaataagacaaataaatgctgatatttcaggtaacctgtgtaagaatgtttttatatctcatttagagaattaagtgtaaaataatggggtggattgcagtccttagtgccttggtttgggtgttgtttttgaaatgacaaaatctctctagggtgccaggagcattacaatggaatatgctttcatatttttgaattggtaatttaacttgttatccaagttcagtgtgattcagattgctgtgtgatgtaattatttgtcaagtgaatgagtaagggaataactttggaaaacagttaagagaaaatttgagaacagtatctagaaaatcattttgaaatactggccacatttgaattaccaggtaaaaaccattgcctgatgatgagatatcatttaggagagttggtttctcttccttttagagaagaagcaatgggtagagagtttcggttgatagggcttagaaaattctctcaacctaatagacaaatggaggttctaaatgtgtaaggcagcactcctgcagggaaaagtagggaagaggacccttgtccttcagattcacatgtagaattaatgtgatattagaagtatacttgtctggttttaaaattattcatatgtttacaaatgtgaggagatgaggagatattaaataccattgggcttttatatttataatttatcatttttattgtgcttttgtatgtatttatatcaaagtggttttatgggttgaaagcagtgagtcaattgcctacgctctgctttgttcagaataaaatgcctaactaggatcaaagtgcagcacatttctttctgtatagagatgttgatattttaaatcaacttttaaattattaactttttctttattttggaatacttttataattacagagaagttgcaaagatagtacagagagttctcaaacatagtttcccaaccccctcactcagtttagcagatgtattaccacaatatatctctcaagtataagaaaccatcattagtacttaactctgaactaacctgtggaatttatttttttgtttttgtttgagacagagccttgctgtgtcatccaggctggagtgcagtggcacgatcttgggtcactacaacctccacctcctgggttcaagcaattctcctacctcagtctcctgagtagctgagattaaaggcatgtgcacatgcctggctaatttttgtatttttagtagagatggggtttcactatgttggccaggctggttttgaactcctgacctcaagtgatccacctgccttgacctttcaaagtgctgggactataggcgtgagccactgcgcctggcctttatttggatttcactagtttttccattgccttttttctgtttcaagatctaattcaagataccacattgcatttgattgtcatgtctcttttgtctcctctagtgtgtgacagtttttcacttttctgtttttctttctctctttttttttttttttttttgagatggagtctcgctctgtcgcccaggctggagtgtaatgggacggtcttggctcactgcaacctatgcctcctgggttcaagcaattctcccatctcagcctactgagtagctttgactacaggcacatgccaccatacccggctaattttttgtgtttttagtagagatggggtttcactatgttggcaaggctagtgtccaactcctgacctcatgatccacctgcttaggcctaccaaagtgctgggattacaggtgtgagccactgcacctggcttacttttctgtgtttttcatgaccttgacagttttgaggaatactgatgaggtattcctcaaaagtgctgaaatgccttgcagttgtatgtagacagtaattcacacacatttacatatacagcatacattttatacttacaataagtggagcttagtatttctaagagggcagagggactttgatttgattatcttagattactggtattgactacaactaattagaataagaccttctttccttttagaaaggctttgattagagaagctgtgtagtgttggggtcaagagtttgagtttcaaagtaaggcaggcatggattccaccatttcctagccatgtggctatatctaagttccaagttttaaactttttcatctaataaggggaataataataataatagtacttaccttttagggcttatttgagatatgcatataatagatttatactggcacatagtaagtgagtagaactaactaactcaataaaataattttatgatggtcatccttgatgggtcaaataatattttaaagtattatctatttgtaatgtgtattttcagcatataaagacacgggtcttagtttgtctgaacaagttaccttttgctgctcttaacaaccatggcagccttttggggaaaggatggcagacattggggaaatgatttcctcctgagaagttggggtggggaacagagggtgttacattttagtaaatgcagactttttttttttttgagatggagtcttgctctgtcgctgagcctggagtgcagtagtgtgattttagctcactgcaacctccatctcccgggttcaagcaattcccacctcagcctcctgagtagctgggattacaggcgtgcgccaccatgccgggctaatttttttgtatttttagtagaaacgggatttcaccatgttggccaggctggtcttgaactcctgacctcagatgatccgcctgcctcagcctcccaaagtgctgggattacaggcgtgagccaccgtgcctggcctagtaaatgcagattttcaatacactacttttcccttctccaattttaaaaaccagatatatatttcaaaaatgtttagcagttacagttggtgaattaaggacaaatgaattgtaaaggactgattaaaagaggttagatattataaaagaaatgggtgaaggaactccctgtttgggtttgaatcctatgtaaaacatggccacacccttctttaagcattatgtgtcgaggataatcttttgataatgtcttttcctttttaacctagcatctagggagagtagactagaatctcgctccatttgggaatatatgcctacagggaatttgacatggataaggatgattgttacaagctccttcagcttccagtttcccccttcaattgtcatctgctcttcttcctatgtaggtattaggaagttatatcatttagtaacactcactgttactatggaaatgtttagtttcttttcttcatattgagaaacaaaacattctcagaatggatagtctttacatcttgatgtttagataaggattcattttgataaggacctaaaagaaaaacaaaccaacaacaggaacaaaagtttctgattattagtaactgtccccactccagagtaggagggcaaaaaagaaacaaatttccattatttttaaattaaaatgaattaaggaagtaatttaaaaggaaagttctttattttcagtttatttttctggattttcagctacaagagaaatgttattttttgttctaatttgtttcatttgattttgggaaaatttatagtttattaatcagatgtgttctaccaagataggcttttatatacttattatttttaaactttagcacttaatattgcttaccaaaataatacccaaggcagtctctttagagtttttattttggatgtgtattagtggtagacactgtgggagagctcttttgggaggattactatattggttgtaaattcattcctaaaatattaatgcacagcatgctgtaaaaattgagtaaacctcctattatatacagtgtaaaaaacggctctgtttgttcaacataggtacatgcatccagcatgttttcaaagtggttagaggggcagtgaagtgaaaaggctacggctaagctgtgggaataacaagaacgtgcagaagagctcctatcagatatatgagtaacttgatggaaatgctgacctggatatccatcttgatggtccactttttaaagtgcattcattgtggatatgttgattgatcctatgaattcttttcaaagttaggctttcatgtgaatctgtagcatgtcttagttttaatttaaaagtttagtgacttctgtaacaccatattattctactttaaagtctgcttcttggccgggcgtggtggctcacacctgtaatcccaacactgtgggaggctgaggcaggcagatcacctgaggttaggagttcaagaccagcctggccaacatggtctctacaaaaaatacaaaaattagctgggcatgatggtgggtgtctgtaatcccagctactcaggaggctgaggcaggagaatcgcttttgaacccaggaggcgaaggttgcactgagctgagattgcgccactgcactccagcctgggcgacagagcaagatttcatctcaaaaataaataaataaaataaaaataaagtatttttctttattccatggaagattaaaagtggattcaggtcagtgacttagtgttgtgtccctttttttcttactctttattacagaaaatatcaaatattctgaagtagagataattgtgtagtaacccccacacacctgtgacctggcttccactgttaccatctcctggccagtgggctatcggtatgctccctttctctctggattattacaaagcaaaccccagacattatttcgctcacaactattttcacatgtgtgtataactctagaagatgaggactcttcttacaattactctttttacaacaccattatctatatgtgtgtgttttttaaagggtggacagttcagataaagattagagggttgattcaggtatcttattcctgaaatagtgatgtagcatgtggtacccaagaaaatatgcaacacttgtggaaaagggcatattgtgagctacgcttttaactttttattagacagatggaatgctctccaatattgattagctagatgaaaatgagaacagtttactacatggcacatttctaagttcagcattttgaatctgaatagtaacatgactgaattgaaagtgatggagccctgcagttagggacacgatgtctaatcttaggcattttatcttcaacattgtcccagttctcttgtgtagggaaaaggaaaaggcacagcatgacctcttccaaggacctcaaacctggccagtttagttggttataacatggtgacgatgaaaacagcatggtaaattcaggcctcctggagggccatgaacctgtctacatgtctgtttctctgtgttgatcagtggctgacagttgcaggtgactgtgactgtcacagtcgttatctctcctgctgtgtagctctcagtattaaccatagtgtttaattctaggccattgacttgagggaaaaagtcattgcagtgaacttctggttgccgtgatttgagtgcaccctaaacatgcacagtgtaggcaaatcggagccacatttcatgctaaacgatcccatgaaatgatgagcaaacatcactcttttaaaaaagagtaagacacatggtgaatcacaattgaacttttggtttcatttgcttagaaacagtgtcttactgtctagattttactcaaggaatacttaactaatcaattgagtcaaatcattctagtataacaagattgaggtttccaacatatcgatttgtgttattaggtgtaattacaaggaaccctttaatatgacttagacgtcttttacccatattttgcctcttaacttgaagtgtagttcaggaagtctgctgccttttgttagcatggtctgccacttgtcctttagggattgtgctgtagtttgtaactttgaggttgtaatgataagaagctttgctatcagtactgttctactgaggagtcaagggcttttctggaaaccctcaattcacattttacacccatttttttggatgaagaatcaagggccctttgatctaacaagcctaccatagaatctaaatggaatgaaggggctgggtgcagtggcttatgcctgtaatcccagcactttgggaggccaaggcaggtcaatcacctgagttcaagaccagcctggccaagaaggtgaaaccccgtctccactaaaaatacaaaaaaaaaattagccaggcatggtggcaggtgcctgtaatcccagctacccgggaggctgaggcaggagaattgcttgaactcaggaggtagaggttgcagtgacccaagatggtgccactgcactccagcctgggcaatgagagcaaaactccatctcaaaaaaaaaaaaaaaaaaaaaagatgataataaatggaactgtgggtctgaatgacatgaatcctgagaagattgctcttgtaccaattctgtagtgacaagaaaagtttgtgagaaaagtttggaaatttagtgtatgagttagtatatgagatatttgggtataggaagacttcaaggaggcagtgggcaagctgagtcttttaaggataaataggtgttcaccatgaagacaagaaaagtaaattcatttcaggaaggataggtcaagtatgtgcagaggcagtttgcaaagataccctgtaaagatcatatcacacatgtctgagaagtgtgaaaaaaaaaaaagctaaagtaaatgaatgctggccagtaagtttcctgctagttccatttcattttcttgtagaaatatgactgtaagttacccagtattataattaactttccaatatagtaatggatttgttatataaaaaattacattatggaatctttgttacagttagaaagcaacagtctatgaagttagagaacttagaacttcttctttgaatttagggagaaggtaacattttggattgtattaagtttttgttacacataaaattaagttagtagaaaataatagaatgatctctttacagatataattatgcttcatctatacctgtcttatttcctcactgctaatcccttctattccttttttctttttcctgtagcggctcttgtttctgaaatcctagttaatatattcctgaagaagaggttttcacttcaattctaaagttatttcagtttagaactatttaattttattttctctaaagttttataatccagttttaaacaaatggcaaagatacctagtttgcttatcgtctcataacaaaagaagcgtgtttttgtgaagcagtgctcatttgtataattagactattaccattttaaatgcatcccatgtacttccatcttccttcctcctgtcttctcatctcttcccccttctttctccagctgtgttggaattagccgttgttgttctcactgtccagcaaggagagatggggagagggagggaggaaagagaggactcttctgtcttttctttgtgccaggcactaggctccatgtggattgccaggacctcagcaaatggaaacgtgttcctcatgtgttcttggtggaactctggaaaatttttcccaggaaaccttaaagaagtttggttgggatctgtacttctgttattagtactttaaaatacttgcgggtttgatctgtataatgttatctttaataaaataacttctagggctcaagggaggaacttacagctgcattttaaagttgtaaaatgttgttttaatattggtaagggcccttgtaaggtagttgacaagaagcgaatattaatattaactgcagttttctaaaataattgtgctaccagttatttgacattttctttgaaagcattctttagtttaaccttgaattctagtcttcaacaacaaacgactcttagttcagagacttaagatttggaaaagaccagactctcacaccatcccacccatgtccgtaggcatttccaacatctgtagtgtctgatgtgacagtttttccttataagtgagctgaagtctgtttcctctagctttgactcattgacccgaatttttctatctggtaaaacgcaagaaaattcgactccctttcctatttaataacctctcaatattgttgagttaccaggatctgtgcccttgcactgccctgtctgctccttagcagtctattttcagcagaagtatccctggcaattccaacaattccttctgttgcttggttctcagatactttatctcatagatttttttgggtgctctgatttgttgacatccttgcagatctcatctgatcagcacagagtatgtgaccgttattttccttgctttagacattatgtccaaagtgaattagttacccatttatttgtgaggtcagccctaaaagaaaatatttttgctcttttgctccctcaacttgttgacatattttctaaacaatataattatttactgtatcaaattgatgctatagtgacaacaataatgcacatagtaataactaacattttggcaacttttaccatttggcaagcactgttgaagatactttgtagtagccctgtgaagtaggtgctgataacaattctatgaggttggttttttgttgatttttttttttttttttttttttttgagacagggtctcactgtgtcgctcaagctgctgtgcagtggcatgattacagttcactgcaggctttgaccttccaggctcaagtgatcctcccacctcagcctcccgagtaactgggaccacaggcatgcgccaccactcccagctaatttttgtattttttgtagagatggggtcttgccatgttgccgaggctggccttgagctcctgggctgaagcagtcctcccaccttggcctcccaaagtactgggatgacaggcacaagctactgcgcccagcctgtggttggtttttaatatcagaagataatatgtcttagatattattatccccattttgcagatgagggaactgatatataaagcgttcaattactgctttatgcattaagttctactaccttactccttttacttatttgtacttccagtgttttacagtggttggaagagactgaaaacaaagatttaaataataactaagatttactgaaaatatctcaataaagtactttatatacagagttggcagcagaatccaggcagcccagtactaagacaaaaggtagtttctcaggcagtctatttattggagtatgctgctaaaagacacttgagcatagtcactctacattgctcattgatcttcttaaatgatgaccaagagttatttaagaaatctgagatgctttctgagtcattcaaagcagactgaactgttttcaatggtgagggaactactgttgtctgattctttgcaaactggtcaaatattgatatatcaggaatttagcgtatatgattaaccagatatctgtatctggtcatgttatattttaaagttaaattcttttaatctgagagtttagcccaatttaaatatatatctaccaggcggccagacacggtggctcatgcctgtaatcccaccactttgggaagctgaggcgggtggatcacctgaggtcaggagttcgagaccaccctggccaacatggtgaaaccccatctctactaaaaatacaaaaattagccaggcattgtggcacatgcctgtaattccagctactcaggaggctgaggcaggagagttgtttgaacccaggaggcgaagccaagatcgcaccattgcactccagcctggatgatagattgagattctgtctcaaaaaaaaaaaaaaaaaaaatctaccaggcatggtgaatggtggttcatgcctgtaatcccaacactttgggaggctgagtggggaagatcacttgaggccaggagttcaaggcaagcctgggcaacatagcaaggccctgtctctacaaaaaaaaaaaaaaaaaaaaaaaaaaaaatataaatatatatatatcctttaaagtttagttcccattacgtacttaggattttttgagtccccagtatttttaacccagagtattaaattttctacgcctactccgaagggttaaattcttctacccactggtctaatttattattttataaagtaggaagtagtggagcaattgaaaaaacaatctataaactctgtattaaacatactgaaccttgtatattagacttggaaattaaacatcaattttttttttttttttgtatttagaaacaaaacaggccgggtgtggtggctcacgcctgtaatcccagcactttgggaggccgaggcaggtggatcacaaggtcaggagtttgagaccagcctggccaacatggtgaaaccctgtctctactaaaaatacaaaaattagctgggtgtggtggcaggcacctgtaatcccagctactcaggaggctgaggcaggagaattgcttgaactcggaaggtggaggttgcagtgagctgagattgagctactgcaatcccggatggtgatggagcaagactccatctcgggggggcgggggggaaaacaagtagttcatttctagtagtagaaccacttgaatagtatttgtattatgtattttaatagaaagctagagtgtaagtttttttgtggttcatttctcctttgtcaaggcgatgacacctttgggggaatgctgccatgacgttcagaaacattctcaggtagtaacattttaaagagattgtttatacatattttgccaataaggaactgaggaaggaactctgagttcagatttgatctccacccaagttgaactctatttttttgttgttactgagaaacacaatggggtttgtgtgtgtggaagggagataactgttagagtgacactggtggctcatgattttggaaagctgttagtgacatctcctctgaccctatactgttgcatctgactcctaaagagtccacattttcacttttggccgcatgatgagctcactggacaaatgcagcagaagtgcctgtgaatacgtggctcattttgtcaagggaggggactgtgtcggcactgatgctgtcgacgtggagctctgaggattgttcttggccctgtgtgtgctcttatggcactgctgcatcctctttagtgaattacagttatttagatgtgtgtgtcctcaagaggctaagcttttggagacaaagactgcatctctccagtacctggtatagttcctggttcataaaaggcaaataacaaatgtttattgaatgattcactcaggttagcttgatggccccgcgcatgctgcctcctcatccccatcccctcacctctgctggcaaagagagctgaggataccttggaggatctcttggtctggagttctcttgattggctttttaaatattgttatagcttggtccttgaacagtgagccagggattttgttttgttttgttttcttccccagcctgcagttgtttccatactcttatttttgggtcttttaactatattttaacaggtacctcatagcctatcattttaaaatcatagatcctacctctcccacatgctcttgccctcaacagaataccatctctcatatttatttatttatttttgagatggagtcttgctctgtcgcctaggctggagtgcagtggtgcgatcttggctcactgcaacctccgcctcccggattcaagagattctcttgcctcagtctcctgagtagctgggattacaggtgtgcgccaccacacccggctaatatttgtatttctagtggagacagggtttcattatgttggtcagactggtctcaaactcctgacctcatgatctgcctgcctcggcctcccaaagtgctaggattacaggcgtgagccactgtgcccagcccatctctcatttttaacctattgatgatagcctgtctggattttcctgttgtattcattgatttgctatgtcattacctcgaatcattttaaatgttgtataatttgcgtaatcttttttcttttcttttttttttgagacaagatctccctctgtcacccatgctggagggcagtggcacaatcatagttcactgcagcctcaagcttctgggctcaaggattcctcccacctcagcctcccatgtagctaggactataggcacgtgccaccacacctggccaattttttaatttaattttgtagagatggggtcttgctgtgttgtctgggctggcctcaatctcctggactcaagtggtcctcccgcctcagcctcccaaagtgtagaaattacaggcatgagtcactgtgcctggcccttattttattgcttatatatctttttccatctcatttaaccatttaagaaaaagaaatggtgagattctgaaattccaggtagaatttcataagtataaaactggtagctttgatatgcttttattggaacattatgaagatatatgatgtaattaatttttatttatttatttattttttgagatggagtctcactgtgtcaccctggctggagtgcagtggcccaatctcggctcactgcgagctccgcctcctgggttcatgccattctcctgcctcagcctcccgagtagctgggactacaggcgcctgccgccacgcccggctaattttttgtatttttagtagagacggggtttcactgtgttagccaggatggtctcgatctcctgacatcatgatccgcccgcctcggccttccaaagtgctgggattacaggcgtgagccaccatgcccggcaggttgacagcagtgtttcacttcacacaagcagaattatttgtggtatttcagctgctttgaccaagccttttagagtcattctggttaattttgagcatgccatgcacataagaaggataaatacaactttactaaagtatagagggggcaaaatcatcacattaatgttactgtgaactttcccttgcctgtgaaagacgattatccactaactgaaccaagaagagtaatgggaatgatgcagagtactgtcctcttgcaagggaagatgagaattttgaaagcgtggcagggatagggtaaggataggacagatagattggtttacaaatgcaacccagctacactcagaggagggacgtttttgtcataagggtcctaataataggcaaagaaatgacttaggaaagtgtcaagctgagttatatgttagaaatgtgtggccacccattgagtcatctgaaaattttgttgttcacattagcattttttatagtgcagtgttctttagaggaaatattttgaggaccaaatgaaccctccttcccttatgtatatttacaagtcatttgggaaaaaaagagaccacctgagcaggtagttggaaattatgttcattttgatgtatctctcagggtgtgtccatcgtggtagaaaagtcccatttaatttactaactcaattagccttaattttttttcttttttcttttttttttttgttcttgtttcgttttgtttttgagatggagtcttgctgttgttgcccaggctggagtgcagtggcgcaatcttggctccctgcaacctctgcctctcgggttcaagcgattttcctacctcagcctcctgagtagctgggattacaggtgcccgccaccccacccagctaatttttgtattttcagtagagatggagtttccccatgttggccaggctggtctcgaactcctgacctcaggtgatctgcccccctcggccccacaaagtgctgggattacaggcgtgagcctctgcccccagcctgttattgttaatacagactaaaactgactttctatggcacagttaccttcaactgatcacaacttgaatctcttcgtctatagttcattgatggtctggctaattgcagtttatccttataactgctcaacgacgagagcattggcttacatcgtagtcttttttgttttatagacttttattgcttggagtggtagacattgctgtggggatacttggtctacagagcctctcctgattttttaaaatgaataaaatggtattactgcagcaacttgttaaggtgatcagggcaggtctattagtctataagacaggacttagtctattttagagatacggaaacttgaaggacaggtaagcgaagtgacttattcaaagtcacgttgctagtaagtagaactgttcctacctaccccacatactgttaagctggtgccctttctcctgtatgtcaagttgtgtggacctcacctttgtgccttcaactatcttgtctgtggttataagtacagtagcttttgccaaaaggaatttatattctgagatcctttagaagctttctgtaacagagatttgaggcactttctatatatgcctgtttcacttcccaaatatctataacctcttatacttttcctgtaacctttaaaattttgattaggtgctcactggatggcatcactgttgcccagctggataagttgtgtgggattggagtgggcagagcctatgatgtcaaggaataatgccccatggggattcacccctcctcggaaatctgtatttggtcagcagatggtctctactgcttctcccgaggaggactcactgtctctgaccaccttgtcttcatttctaaggcttaaacatatcctgaggagtacatctaattttctttgctgtagttatgttattttatgatggagattagaggagcctcccttctgatgagatccaggtcttgacctgatggcatagagttaatagtactggctcttgttcaaactctgatcctgctactttttttttttttttttttgagatgaagtttcgctcttgtcacccagggtggagtgtgatggctcaatcttggttcactgcaatctccgcctcccaggttcaagtgattctcctgcctcagcctcctgagtaactggaattacaggcacccaccaccacgcctggttaatttttgtatttttagtagagaaggggtttcaccatgttggccaggctggtctcaaactcctgacctcaaatgatccacccacctcggcctcccatagtgttgggattacaggcatgagcccctacacccagcctgatcctgctgctttttaaactaaatggccttgggcgcacactctgtgactcagtttaatctttatctttgaaacaggggtaagttcttactgcacagggtattgggaagattaagctaaatattgtatcttaagctcttggaagagtgcctatcacaaagaaggcactacttaaatgttaactattattattgttacttggaaaaggaaaacgctagaataataaagcctacttgctctgaggtgtgcacatgtggttttttgattaattttttttatgtatgtaggtctttcttatttcaggcaggatctcagttttaatagctgctgtgtaggtgggtcacagtttctttggatagcccagctggtagttttctcatttgggaatcaagccataccttctaagtagagtgctttcctggttcttaactctttgtgatagagccctgatgtgcccaggttgctctgagtagaagcacttaaatctcccattctgttgcagcttatgggactgggcagtggtgtagctagtggtagcttttgtggtcacctatgcagctcactgcctagtggccatattaacatgttgaatttatgttctcacgatagacattcctagttctacatagctcacacaggactgcccttgcttgtagcctcgttaatgtggtttcctcctccttgtttccagcagaaacagcttacggtctagaaggaggaaaggaagccaatacaacttgatgttaaatcattttctcttagttgtccaaagggagtatttagtgggatgcttcatttgaaatggaatttgtcttcttcaaagtggttgccaaatgaaaggatgcactagatgcagaggccgcctggtgagaaaggaggaggtataaggtcgtcttctggccattcttccagcaagatgttttgagggtcctcccaagtactcaacgtggggttatatcagtgaacaaaatagaaaaatcctttcctttatggagcttacaatctagagacaaagatagagaaaaaataagaaaattccatggtacagtaggcccttcttactgcgagtttcccattttcagattcaactaaccggggatcaaaacctgccaacacggagggctgagtgtactatggcattttatgtcagggacttgagcatccgtggattttgatacctgctggggtccaggagctaatccccagtggatatggagcgccgaccatatgttggtgatcacctcacacttctcagaacctttccacacatcccatttcactcaccttaaaagccagagtccttacaaggcctgagggtcccacaggatctgctgcttaccccatatcccctgcccccttaccttctgacctcattgccagtcactgtctccttattatcagtgttctcaagtccctcggacatgccaagtgtgctccttttacaaatttgagacagggtctggctgtattgcccaggctggagtgcagtggtgtgatcaaagctcactgcaacctcgaccttctgggctcaagtggtccgtccacctcagcctcccgagtagctggaactataggcacgcaccaccacgcccagctaattaaaaaatttttttattagtagagttggtggtctcactatgttgcccaggctgatctcgaacttctgggctcaaacagtcctcccaccccagcctcccaaagtgctgggattacaggcatgagccaccatgcctagctaaggcatgcttctctaagggtcctaactctgggtacttcctctgcctggcagcatcttcttccagataaatcctatctgccaacttctccggtttttcctttctaaatgtggtcttttcagtgggcaccactctcaccaacctatttaaattacaatccaccaccttcccagcagtcttgaccccctttctcaagctgttttttttttctctgtagtgcttaccaatttttttaacatataatttatttatttgtaaagaaagcttaataggggagggatcttcattttgttttctgaagtatattaagggctcacctagaacggtaattggcacctctagtagatattcagtaaacatgttgaatgaatgaaaatgaaaagtacaatggaaaaaataaagaagggttgcattagtttcctgtggctgctgtaacatattagcaaacccttggtggcttaaaacaatagaaatttatgatctcacggtatatattgcacatataactattcatccatctaatatatggaggtgtgtgtgtattgtattaaaaattgttttcataaatggaatgtgtcatgctgcagtttgcatttgtatcaagtcagattgatacatatggatctagttccttcattttaactgcagctctaagcagctggttctctttctttcctggtttcagaatatgtaaatcccagagaagtcctctgattaacctagcttgggtcccatgctagcacctgttggatcagtctgtggcttcagcagataggacactcagattgctcagacctggagtgcatgcttacccacgaatccagagcatctgggtactttgtttgcagttccccttaggatcatgagtttgaaggagaaaggatttggggcaaaaaacacagatttctactgaggcttcaagtttgggcttggatattacatcctctgggaatccttttctgacccctgggattctgttctgtgtccttgcacttcctattcttgtaacagttatcatgtagtatcttaattaccctctcctcttgatgtgtactcattcagggcagagactgtgtctgtcttgttttccttttgtgtctcaggaaataaaaggcctgccacacaccattaagtagattctcaacacatatttttgaatgaatgattccactagctagcagaggtttcaaactcactttctataaacaggttcccatccacttcctatgaatgccgtaggaatcctgtgtagcgtggtgcttttgcacctactttcaggcccattaacattctatctctttttacatctttctttatatgagtggtttggccctgtttggaagtttctttttcttatttaatggtgaaaattcacagaaagataaaattggtaaaatgcaaactcagactttctcagtaaagtttttagagataagtcctgcccagcctttctcaccccagtatacctttagctttcatgtgtgcacagtagtttctcctaagctcaaatattccatcagcagaacctttttttttttttttttgagacacagcctctctctgttgcccaggctggagtgcaatggcacgatctcagctcactgcaacctctgcctcgtgggttcaagcaattctgctgcctcagcctcccgagtagccgggattacaggcacccaccactacgcccagctaatttttgtatttttagtagagtcggggtttcaccatattggccaggctggtctggaacttctgacctcaaatgatccacctgccttggcctcccaaagtgctgggattacagatgtgagccaccatacctgatctagcagaacatatcttaggcagatttacttctggatacttttagcatcaggagagtatgaattttagtggatataaaatgtgaatgaagctgggtatggtggctcatgcctgtaatccagcgctttgggaggctgacgtgagaggatcaacctagcctagtagtttgagaccatcctgggcaacatggcaagaccttgcccctactttattatctaaaaatattttttttaataaaaaataaaatgtgaatgatttgatttggaaatggtagtgttagtagtagtactagtaatagtaatagcagttaacatttattgagtgctttttctgtgccaggcatgtagaagtaggtaccatctttatacgtgttatacagatgagaaaactggatcttagatcagtgatctattcaagttatctcagctcctgagtggtggtgctgggctatgaatctggacactgaactcagaaccatacacctaaggactacgttctactgccttgtgtaattaggaacagaaacctggggtttggtaaaagaaaaagagatcagactgatcacagagaagcagtgaagtttctgccctaaagctttggtaaagataaatagggagaattaaccaaagttttagaactgtactcccattgcctctgtgaggagagaaaaccaagatgtgtggaggtggggctgaagccatgtgctttagcataaattggcactgtgttacctacaatattgggaagagcatttgagaaatacagggtggtcagtgcgttttctgcttcccacataaaagttggtctttagccctgagatcctggctgtgggaggagtcatttaaccaggaaggcattgaacatctggataaatatttagacataaaataagttttacataaaatacttacatgaagcaaagcacaatgaatttgtaagcatttcactgaaactgggagaggcagcctgaaaagtttgtagcagacaggcaatggaatctgattctactgtaccattaattgaagatgtgtacaaggtcagtgtaaaggtcttgttctttttctttatttgtgctattttaaatcagtatatacaatggcttttatatgttcagtttagatcttagtatctgtctcttgaccgtgtatttactcgatagctctgaattctctttctgtcggagagaattattccttatgttttcaggaataaaactcctgcattggaggagattactgatatcactaaacctgatggaataatctatgttctttccagcctgtctcctatgctaggttactgtacataccctccaggcagggacattttcctgcttttataaagtacttggctcaaatactaagtacagacatgcatcacttaatgacagggatgtatcttgagaaatgtgttgttaggcagtttcttcatggtgcaaacatcagtgtgtacttacacaaacctagatggtgttagccaactacacacctaggctattgctcctaggttacaaacctgtgtagcatgttactgtaccgaatactgtgggcagttgtaacaaaatggtaaatatttgtgtatctaaacatagaaggcagtgtgttgtgctatgacattatgatagctgccatatcactaggtgataggactttttcagcttctttataatcttgtgggactgctgtgtgtggtacgttattgactgaaaggttggtatgcggcacatgactgaatactctgttggtttatatttggactaacagtgctactttcatagaatatctgttccaaattgggattatcttatttctatccatagaaagtagttataggataagtggatggtattaaaattaagttttatccccctttaggttgcatcccagcgcattagctcagtggacctctcgtgttgtagcctggaacatctgcctgccaacctcttctacagccaagacctcactcatctcaatttaaaacaaaacttcctaaggcagaaccctagccttccagctgccagggggcttaatgaactgcaaaggtaagcctgcagaaatgggtagatcattaggaaggggtgggggcagaatgaacttctgcttgttatctcttgaatattctcatgaaaaaagctagtgtgtaaactttctccttcagataacagggtaataggactttgtttattagtgaagacattaccaattctcaatctgaaattttttttaaggttcttgcttttgaaactaatgatttatgatatttattaactggatagagttgtgtaagaacaattctccttaaacaacttttattcctatctaaaaatgcatgtgcaaaaaattaataacatttggtgtgttacttctgaacttcaggtgtttgttcagattaaattgtttcttttgaaatttatgaaaggtcattttttcccataaaaagatatttccttagaaatttaagaaccagcgtttaaatcaacttacatcatgtcatctgggtgattagtgtgtgggtttcaggagtcacatgttaaataaatagaacctgctcctttattttttatttttttgagacagagtcttgctctgtctcaggctggagtgcagtggcatgatctcggctcactgcaacctcctcctcctgggcccaagtgattcacctgcctcagcctcccgagtagctgggattacaggcgcccacgccctcttaatttttgtatttttagtagagatggggttttaccatgttggccaggctggtcttgaattcctaacctcaagtgatctgcccttcttggcctcccaaagtgctgtgattataggcgtgagacaccacgcctggcctagaatctgctcatttaaactagaagagagggacttgacttgcatgtctccaaaacagatttaagaatttaccacattcacttcctttcctctttggagcagtgatcagtcttcattctgtggtaaattaaacctttgatacttatatatttgttgcaaatatgtaagactatgtaactgcaaagaatataacttttaaataaataattgctagttcatttgtttttacatgactgatatgatcaggaattaaaatgtgataaccattgtgattctgtttatggtttttaacatccagaaaaaataatccaatagttgcttataaagtttgtggatgtaattggaaaatggaagagtattttaattgtcttttcaggtaattgtgaatatccttccttgatactataccaaaacttgacaagtggtcatttcttaaatgttagttctaaaatggaatctaaaaccctattcgtgagctttttgaattctttaacggtaagatccattgatctgacttgcagtttgatttgactctttacccatgcatcactttattgcattaagtgttggtcatttggagagtactactccgttgtgtaacacagatactccaaatgttaatgtattttattatggaattttaagaattcacatttgttaatatcaccactgatctttttttttttctttttttgagatggagtctcactctgtcgcccaggctagagtgtggtggcacaatctcggctcactgcaaccactgcctcccgcgttctagtgattctcccgcctcagcctctgaagtagctgggattacaggcgctcccccaacacctggctaatttttttgtatttttagtagagatggggtttcaccatgttggccagtctggtctcgaactcctgacctgaagtgatccgcccaccttgacctcccaaagtgctgggattacaggtgtgaaccactgcgcccagccaatatcaccactgatcttatcagtaaagtcttttaagtattgggatgttgttaagcttactgtggaaacgagttttccaaaattttaatttttcattagaaatttgaaggccattattggcagcacatgccatcagttgttttctggtaagcagacttctcacttcatttttgagaaaatgtctgccaaatacccaagtatgaataataatagtttgtcagttgctctttcaagtaaaaatggggttctctataaatagcgactggtttggcccacagctcacataatcagataagtgttttccttgagatgactatcatacttcagtgtgcaccagaagtgttttttgtgtacttcctattttatcacccagaaaattaaaaagacatatactcaggggttgagatgtaataagaaataactttcgtgtgtcatcaaggacattcttaagtaaaactggcattacaatttttttaaagaatatttttactgttaatattgcccggaagaaaagaatagagaagaatataatgacaactgggacagtttggtgctgcagtgaattaattacgtaggcaatcgagactctaataaggatattttgctccagcaattcctgattgtcccctgtagctgacgtgtactatgaaagttatcactgtggtattctttttttttttttttaattgaaagcaagtttattaagaaagtaaaggaataaagaatggcttactccataggcaaagcagccctaagggctgctggttggctacttttatggttctctctctctctctctcttttctctctctcttcttttctttcttcttttctttctttctttttttagacactgttttgctgtcacccaggctggagtgcagtggtggctcacagcaaccttcgcctcccgtgctcaagtgatcctcctgcctcagcctcccaaatagctgggattacaggcatgcaccaccaccacgcacagctagaatttatatttttagtagagatggggtttcaccatgttgccaggctggtcttgaactcttggactcaagtgatccacccacctcggcctcccaaagtgctgggattacaggcatgagccaccaggcccagcctatggttatttcttgattatatgctaaatataatcagtggggtagattatttatgagtgttctgggaaaggggtagccaagtcccagaactaagggtccctcccctttttagaccatatagagtaactttctgatattgccatgggatttgtaaactcatggtgctggtgggagtgtctcttagcatgctaatgcattataatcagcatacaatgagccgtgagacagccagaggtcaacttttcatcaccattttggttttggtggcttttggccagcttctttaccgcatcctgttttatcagcaagatctttgtgacctgtatcttgtgctgacctcctatttcatcctgtgagtaagaatgcctaacctcctgggaatgcagcccagtaggggtaaaccttattttacccagcccctattcaagatggagtcactcaggttcgaatgcctctgacatatttcccccttcccttttatttttttatttttaaaaatttatttgtttatttatttattttaattaatttatttttttgagacagagtctcgctcctgttgcccagactggagtgcagtggcacagtctcggctcactgcaacctccacctcccgggttcaagcaattctcctgcctcagcctcccgagtagctgggactataggcgcccgccaccactcccagctaatttttgtatttttagtagaggtggggtttcaccatgttggccaggctggtctcgaactcctgacctcaggtaatccacccacctcggcctcccaaagtactgggattacagacgtgagctactgcacctggctgcccctcccttttataaggagatctttaatcctaagggttgtagaggaatgaagatccatcttctgtaacttcttcaggctgaatagggacaatgatattcctacctaactatgagggcctcttgtattcaaggtagagaggaggtcagtcacaaagcgtaggtctggcgagggccattgataacagtgagttccaacaagaggtgctatctggaagaatagtaagtgttcaatttaagaaaacattcagtaagcttatctgcattcctacacaaagagtacaacagcaatatattctacaacagtaaaacaaaataagtaaaattatcccaagtaaactaaataagaaggctttctattaactaggcagttgttgtggaaccaagctgatatggggtccctggctgattccagtacctgcccagaattagaatactgatcaggatttttacattacccatcccttttatttcttctgagcagcagcagagatcactggttggttcacaggaataagtaggattagtctaaattgcaggaaaaaacctcaaaaacaactgatactagaatctaataacaggtataccacagttctttaaacataatttttctgtcttcagtctcgcattttcaccaaagacaaatggtaggactgatttgtttgcaaaatacttaagcttaggttttatatgctctatgtattgttactaattttggactggctggatgcaatggctcagtcctataatcccaacactttgggaaactgaggcaggaagctggcttgagaccaggagtttgaaaccagcctgtcaatgtcatgagaccccatctctataaagaaaaatttaaaaattagctgggtatagtagcacatgcttgtagtctcagctactggggaggctgaggcatgaggattgcttgatcccagtagtttgaggctgcggtgagccatgattacactattgcactccagcctaggcaacagagggaaaacctgtctcaaaaataaaataaaaagttgtactggcactacaacagtaaagttaatatgcttttttttttctttttggctgaaaggttataatcattattatcattttgtttgtttgtttctggagctacccatcatgaactatcatcaatcagtgtgttctgaggtttgaaattattgggaagtatttttgcatatttcacagaagtgtagacttttgcacttctatcatagaacatcaaaggctttctatcatactgccaaatcctgatgtcttagaacagaatggtgcattagaattcatccagactatcaacccaaatgcccatcaatgataggctggataaagaaatgtggtacttaatataccatggaatactatgcagccataaaaagtgagattatgtccttttcagggacatggatggagctggaggctgttatccttagcaaattaaggcaggaacagaaaaccaaatactgcatgttcttacttataagtgggtgtcaagtgatgagaatacatggacacatagaggggaacaacacacagtggggcctattggaggctggagggcaggaagaaggagaggattaggaaaaataactaacagatactaggcgtagtacctgggtgatgaaatatatgtgcaacaaaccctcatgacacacgtttacctgtgtaacaaacctgctcatgtagctttgaacttaaaataaaagttaaaaaaaattcatccaacctaatgctctcttttaaagttggggtctatggggatgttaactgccaaattcagtttaatggttaccttttagggagacgggggatggggattagtgaatggtttgaacaaggtttcaactatatctgtaacgtttatttctttaaaaagaaaaatgagaggccaaaacgtttttgtttttgtgttttttgtttttttttttttggagacagagcctcactctgttgcccagcgggagtgcaatggtgcgatcttgacttactgcaacctccgccccccaggttcaagcgattctcctgcctcagcctcctgagtagctgggattacaggcacccgccaccatgcctggctaatttttgtagttttagtagagacggggttttgccatgttggccaggctggtctcaaactcctgacctcaggtagtccacccatcttggcctcccaaagtgctgggattacaggcatgagccaccacgcctggcccaaaaggttagtattttaaaacgctgtatagttaatgccgatgaatgttacagttttctgcattttttaaatttgagtatttcataataatccaaacattttaaacctaaataaaaagaaaattaaaatgctcccaaagagccagtatttgtggaataaatatccaggtggagggatattttgggcatgacccacttcaggaggattcagattctgtcttgccttttagttcttacagagtcaccgacttgatcccccatgtctgttgattctgtgtgatatcttttgagctcatcctcttttctcctctgctcccatccctctactgcacacaccctctctccccagctgttatagtaaaagtacttctcaaccctcacctggtctgttgcgctacctttgagagctgattgtcttgttgtcattttccctctgcaggttagccctatttttgttgcccactgttttttacatttcttggttttgttttattttgtatttttaaaaatttaagcctttttccttcatcaaagtaacaccctatatagatttttaaagatcttaataagcagtgaagtttacaataagaagtaggtgcctgaagctccagcccatccctacatccaagtcctgctccctagacaacccttttgaatcttttggctctttctgccgttttcctttctctttctaaatattatgtgtatactgctatgttttgattttttcattattggacattatatgttgactcattactatggaagataaggatttcattcatttacattgtctcacgccccatctaccccacaccacatgtactaacttctctttcccctatcctctcaatatataggtgttaatttttggttaagtcagtactcactgtttacgttattatgaacctggaacttattcacagctaagggatttaattgcagtgattatatttcctttcttgtgctggcttgatagcagcctcactttatcacttgtatacttttctttttcccctggtatttgtaagctttctgacggaattcttatattcctctcagcacctttttcttggagacttttttcttcctggagccagggtatgtgcttgttcttctggcctgctacacagcaaagacagtgtgtggaccttttcctcagggggtgtcagtttactagagaaaccctttggtattctgccacggcgatgcatgccaagatttagggtaatgagtggaaaagagaggaagaatctcaaggtttagtatgtggatttttttttttttagatggagtctggctctgttgtccaggctggagcgcagtggggcgatctcggctcactgcaagctccgcctcccagattcacgccattctcctgcctcagcctcctgagtagctgggattacaggcgcccaccaccacgcccggctaatttttctatttttagtggagacaaggtttcactgttttagccaggatggtctcgatcttctgaccttgtgatcctcccgcgtcagcctcccaaagtgctgggattacaagcgtgagccactgtgcccggccatatgtggatttttatttaacttccctgttttcagaacagtgttttctgttatgcttgataacttttttcttttcaatttatgagagatattttgacacttaagtaattacaaagaattaaacaatactacagattataccgtcatcctttgacaatcatgtcttattcattttaacttccataagccagtttctatagcattgcatgtgtaccaaatcaataagggataacttcagactattttagatgaaaattgtatcttgcctgtaactttgggaggctaaggtgggtggatgatttgaggtcatgttggccagcctggccaacatggtgaaacccgtctctactaaaaatacaaaaaaatagctaggcgtcatggcgcacacctataatcccagctcctcaggaggctaaggcaagagaatcgcttgaacctgggaggcagaggttgcagtgagctgaaatggcgccactgcactccagcctgagtgactgagcgagactctgtctcaaaaaaaaaaaaaaaaaaagttgtatcttaaaattgtatatgtaaacattaacattaaatgtacaaatttagttaatactttgttttcagtgacatttattttctctaatttcccaaacctatcattgatcagaaaaataattgcaaagaacacatgtctgataagacagtattactgagccatgtggtatgaaaggagataaaggagtctttgatgctacccagatggacttctggaattatctttttagagatcatatgttcaataatcagcatctcagaaaatgagtatattacactgagactgaaatattttgaatataaaagtaaaccaagtcactggacatgagccatctttcagctgttgtttaaaatctcaagatgaagaagaatcattgagaatactcaagctgtatgtataactaaataagaaattaactcagtggttttcattctcttattgctctatagtttgacaaactattctctcttttccaaattacctccctgatgctttgacagactattctctttcttccaaattacctccctgggtcaaatgaagggccgaagaaagcagtttccctgtttgtcatgctgtgatgtagtatgcctgatgtctttgaatcagggactctggttcgttttcttccagggaataaactgtcctctgctggaattggggagaggatctggggtcttactcctccttctgtaaccttttgaaaatttgtagaagtataaaaaaacatagaaaaggcagatatgagtgtataacttgatggatttccacaaagtgaacacatccatgtaaccagtacacatatgaggaagagaatattgccagcactccagaagctgtccttgtacccttctctttattaccctaaacatcatcactatcctgacttagaacatcatgaagtagtttcacttgtctttgtacttgatctaaatggagcacacaatatgtgtttgagtccagcttctttcactgacttttcttttaaaaaagcaaaacaaagcataccaagtgacatattatcagcttgtactttgtactgtgtaatataaggcagtgattttgatttgtttaaggtagagaattttaaaattttacactgcaataaaagatttctgttttgttctttctgttgctttaagcatggggaagataggcctaggggacttcctatgtggtatcggagtaactggtgaagctgctgttttgctgctctttgtaaaaaactaggctttataccagtttctctttctttttattttaagacgggctcttgctctgtcgcccaggctggagtgcagtggcacgatctcgcctcggcttactgcaacctctgcctcccaggttcaagcgattcttctgcctcagcctcccgaatggatgggactacaggtgcgcgccaacacgcctggctaatttttgtatttttagtagagacggaggggggtctcaccatattggccaggctggtctcgaactcctgaccttgtgatctgccagcctcggtctcccacaatgctggaattacaggtgtgagccactgtgcccggccaccagtttctctttcattacacactactatgaggtgtttgtctcccacttccattgtccaagaaaaatttttattgctaagattccagagtaataagttgataagtacacacatgcatatatacccccctcttatatacatatatttaataccaggaattaaatgtataatgtgtatttaagaaagtcatgttagtactgcagaaagcattaacgtggtttttaaatgtccagtcacttagtgtggtggcttcgaaatatgccatatatttagttgcttatttttatttgtgtgtttaggaatttgtggtaatctctaatgtatgtttcacagggaacattttagatgccaaagggtaatttatttttacgtttttacctaagtttcaaggaattaagttttaggttacaatgttaggacaaataaccagggagaaacttaaagtacaatataattataacaggtaggagttcagagacattttatcttaagcacatatccccttaatttttctttctactacaaatttttacctttaacaaatgagctattttcacagaacatttaaattggtatttgcaccaacattctaaatctggaaagatggcatgctgatgtacacacacaggtcagcagtttcagagggaaaacattgttcttggaactagtgctgtttgtttttcctttattggcattggaactcttcaagttagttttcaaaatatagaggagaggcaaacatcagggtaatttttggtggtgttgatggtttctttccttattatatgtgtcactaataactataatacattgtttatctcttttattaatagtacttcatttatgttaactatatctctagatgactcagatagtcttaatactaagattattgttatttgcaatagagaatgatttttcataaaatatggtaagtttctttgtagagtcagtgaagaagacaactttttgctgatttaaatttaaggaatatattttttcccccatgtcttaattttatgtttttaatatgatagcaaagctgtatgaacttattcacactaaattataatggtgtttgaacattttactgccctggtaaattcaaatttagctctgtttatttttgtttttgtttttgttttttttgagatggaatttcactcttgtcacccaggctggagtgcagtggtgcaatctcggctcactgcaacctctgcctcctgggttcaagcaattctcctgcctcagcctcccaagtaactgggattacaggcgtgcaccaccacacccgggctaatttttgtattattgtagagacggagtttcaccatgtcggccagtctggtcaccaactcctgacctcaggtgatctgactgcctcggcctccgaaagtgctgggattacaggcgtgagtcaccacgcctggccaaatttagctctgaaaatttttttttttttttttttttttacagtcttggtctgtcccccaggctggagtacagtggcgtgatctcagctcactgcagcctccatctcccagacttaggcgattctcctgcctcagcctcctgagtagctgggattacaggcacgcgccaccacgcccagcaaatttttgtatttttagtagagatggggtttcaccatgttggccaggctggtcttgaattcctcacctcaagtgatccgcctgcctcggcctcccaaagggctggggttataggcatgagccactgcacctggcctagctcttataaatgtgccatttatttatcatttattaaggatgtatagggaggatcattgaaggacctagagtttgtaaatatagaggaggcaaaactttacccgtaccctctaaaagcctccacctggttctgagaactaaatggacataaggcattagcaggagaaaagtatacagatttttacatgtgcataggaacccccatgggaaaatgaagacctaaagaagtgacaaaatctaagtgcttatgtactaggttgaacccagaagaaattgtggaaaagtaagtcaaatatatggggagaccaaaggaagatgagttattttaacaaatgatgtttgtacagaattgtcttagcctccattccgtctcttgtggtcagaatgttgctttcctcctgctacatagagggcatctttcacaagggagttttgtttcttgatttcaagaaggggaggtcagaggccagatgcagtggctcaggcttataatcccagcactttgggaggccgaggtgggtgaatcatttgaggccaggagtttgaaaccagcctggccaacatggtgaaaccttgtctcaactaaaactacaaaaattagccagtgtggtggtgggtgcctgtaatccgagctactccagaggctgaggcaggagaatcgcttgaacccgggaggtggaggttgcagtgagcagagatcgcgccactggactctagcctgggggacagagcgagactcagtctcaaaaaaaaaattaggtggggcgtggtggctcacgcctgtaatcccagcactttgggaggctgaggtgagtggattatttgaggtcaggagttcaagaccagcctggccaacatggtaaaatcccgccactactaaaaatacaaaaattagccaggtgtagtggcgggtacctgtagtcccagctactcgggaggctgaggcaggagaatcacttgaatctgggaggcggaggttgcagtgagccgagactgagccactgcattccagcctgggcgacagagcaaaactctgcctcaaaaaaaaaaaaaaaaaaaaaagaaaaggggaggtcagagcactcctttttacacctgctgtttttcaagtgcgtttggcccagtataatccttatgccaaagtggtatattttggggtagcgtattctgcagtccttcataagggatgatagagagttcttttatggtgatatcctgccatgtttagaaaaagaaataggagaatgaagtcaaaagtaaagtttgatagtaataatttgtatgtgtgtgtttccagtaactttgtccatggtacttggaaagtttgtcacttaagttcaactaaaatgtctttatcttagactattttaattactagttacttataccaaccagtttaagaaagaagcctgtgttctagtaagtacttgccaaattggtgacaattaaaatacacttaaattgtttaattctatgtgtggaaattagacaaattataaaataactacttcataaatagaaatttattataatgtttcaattgtttgtttatggttggtggttatcgcttccattaataaaggaagtggatccagatggatctttctggcttttgctgtttgtaagtaaattggtatagagaaacaaaactagcacagctagaaggtcctagctggttctagaaatggaattacttttatagggctagcactataatttcagtagaagttggtattttaaatgacttgataaatcatgtacagtaactcctcatttaatttcatatgtaatgaaaccagttttaccataggttaattgatataaacaagagttaagttcttagggcatgtttctggttacaacaccacgaaactactaaataaagatcaaaacgcttttaatattaagcattgaaataaatatgagctatgcatatacttaagaaagataaataaagggccggatgcggtggctcacgcttgtaatcccagcactttggggggccaaggcaggtggatcacgagatcagcagttcaagaccagcctgaccaacacagtgaaaccccgtctctactaaaaatacaaaaattagctgggccgtggtggtgcatgcctgtaatcccagctactcgtgaggctgagacaggagaatcgcttcaacccgagaggtggagtttgtggtgagccgagatcacgccattgcactccagcctgagcaatcagaacgaaactctgtctcaaaaaaaaaaaaaaaagattaataaaaacaagtaagatataggccggttgaggtgactcacgcctgtaatcccagcactttgggaggccaaggcaggtagattacctgaggtcaggagtttgcgaccagcctgaccaacatgttgaaaccctatctctactaaaaatacacaaacttagccgggcatggtggtgcgcacctgtaatcccaggtatttgggaggctgaggcatgagaatcgcctgaccctgggagacagaggttgcagtgagctgagattgcgccactgcactccagcctgggtgacagagcaagactccatctcaaaaaacaaacaaaaaagggcaattatttaccaagtttttccagttcaggttgctggtggctggagcttctcccggcagctaagagtgccagacaggaaccagccctgggtaggacagcatcccatcacagggcgcgcacgcacgcgcgcacacacacacacacacacacacacacacactctcgctctctgtctctctctgtctctctcacttgccatgtggacacactggtgaacgtaatgtgcacagctttaggatgtgggaggaagtgagtaccccaagaaaaccacacagacggaggagaatgggcaaacttcacacagacagcgatcctcaccaggaattgatttttttcctcattaacattatagctaaatgacattgaatgaaatgacattgttcgaggacctgctatgtatctgtagaattattatgattatgattatgattattatatttgagacggagtctcgctctgccactcaggctggagtacagtggcgcgatcttggctcactgcaacttccgcctcccgggttcaagcgattctcatgcctcagcctcccgagtagctgggactataggtgcgtgccaccactcctggctaattttttgtatttttagtagagatggagtttcactgtgttagccaggatggtctcagtctcctgacctcattatctgcccacctcggcctcctgaagtgctgggattacaggcatgaggcaccacgtccggcctatagaattcttaatgtgatttttatcatatatgatatggaaataggacaaaaaaaagtataccaccagcgtttttgtttttcttaacattctcctttggatattgaattttgccattgtgtgttactattgtcccctgacagttttataaaattctgtgtaatagttaagcctgtttttgtaaagatactgtgactcatgggaatagcagtatggccttaacttttatcacctttgttttctatatttatcttgtgtgctctgcttggctttgcattctgagagggcaggaatcaagtccccctcagaggtcattactgttgctaggtgagcattaaatagatactccataaatgaacgcactcttgagtgaatggtgggggaagtgcctttattcattcaattttatgtattcttcgcaaaaggtatttgtagcaacttctttgcaaaaggtatttgtagcaactttttttttttaattttgttttttgagatcagagtctcactctatcctccccccgaggttggagtgcagtgacacgatttcagctcactgcaacctgtgcctcctgcgttcaagtgattctcctgcctcagcctcctgagtagctgggattacaggtgcccgccaccacatccggctaatttttgtatttttagtaaagacggggtttcaccatgttggccaggctggtctcgaactcctgacctgagatgatctgcctgcctcagcctcccaaagtgctgggattacaggtgtgagccactgtgcccggcctgtagcaacttttagaaggaagtgagactggtaatttatcattgtatttctctttggttgaaagtatgataaaagacaatatgcacagtgagatgattcagaaaaccttacgtagaaaaatgtaagagaggatttgaagttggaaaaggagatactagttttaaaatggaccgtatgaaactggacttctaaaaaaaaatctatggtttattttaccattctctaaactcacttcacattctcttgccactcatcttgcaagaatgtgccccaacttttacctttgaccacctgccgaacccaggctcaacctagcgactcctaccccacccttcaaagtgtatttgtaatggcattttttccttgaagcttttagttacttctcaattccatgtgaccttttgctcttctgaattgttcactttttaaatattttttgtacttatcaatccttttatagtaagcatctaaaaatttctaaaattgccatctactgtaaagtccttaataaatactcactgaactgaattgttggttttcccaccaccaaggataatcaaaataatgtgatcataaaactttaggaagagaacatttagaaatgctttgagcagcggaaccatttcttgtatttagtattcaaggtgactattttaaggggacatcagtcacttagaatgattattgatcaaccacattgcattatgtggcacctacatatcagtttcaaggaactcaggcttgtgtgattgtgtcttagaggctgtggtataaattgagtaagttttcacctgaaataagtaaagatgacttgggtcaagaggggagtgaattcaacacttggaggaaagacttgatttgagctctgattagatgtgaaatttggtttagctgaaaatggagagatggaggggcaggtcctctcatgcgagaaagagggaaagagtgaatggagttgggcgtgcaaggatgtgggcataatagaatgaaagtatgaagaaatgagcgatgagaaactcctaattatgcatggcatttatcaagtacctctcttcttagaaagctcaaatttctacatttttggtccccttggagtagaaaacaaatgaccttatttcctattctgctcttctgctcttttggggatgttggcattccagatgtaaagtgattaatgttaattacttatcattaccaaaagcccacatttccaggttttattgaaagattttagtttttgtttttatacataattcatgaagacttcttttaatggaaatagtgataattcattagcatagtgaaataaagagtggcatgctaaaacatttttgcagttcatttgatcgatttaaacagcagcgcttagaacaatttcagcttctttgaagacactgctgtataaaaaacgttagaggcaagccagctgcagactgctgaagaaagagtaaagcctatgtaaaagaaaaacagcacaaatgctgctcagggttagagataaccttgggaaggaatttccactaccagggttccatgaggcttgccaaatgttaaaggaatttcatggaatgtatggaatgtctttttgtcagttaactgttcccagaactggaagttcctttcttatacagctttgcttttcagatggaattgtgatcctcttgggaagctttccatttcacaagattcccattttccttcccagagaatttgagcaaagcagagccggcaggtggtgcttggggctccgtgattatatagcctttggttctcttcttgcctaatgctgccgacctaatttatggcaatgatggcccattttcttattccctcatatagtacattttgaagacggagctcagaaacaaaatatcagccaggctatattaaattagtttgccctattgactttttgggatagtttaagatgttctttaacatttattcccacttaaatagaagggagagaggctggtatcttcaaaagccttggcttgattccaattcagttattgtattctgtccacttccattctttgagctctgtggagctctttgccgtattctctgagctttaacttaactgcaagagtttaatgccaacactgtatttgtagatatttgctattctgagtggtaatcaactttactctgcacagctcctagtgcatagtaataagtatagagtaaaaggaccaaactgatgcttattttgttgatggtgaagtgtcatcataacttgggacttgggaacataattaacatctttgctgatgacttctgaaataattctttggttgccggtatgagaatgctgatggagaccaatactcctctcctccctctctctgctacttcatgtcaaataaacacatctaattctggagctcattcagacaacacacgcatgtcagttttgaaaactaaggacccatgaaaatgtctgtttttatttagtggctgtaattttgatgtcactcaccatgctctaaactaatggagctttgaatgggaggagtcacattcctcttgtcatttctctggagtggtgaggatgatgacaccagaactggcaggatatttgacagtgacctctgtaaaagcagggcacacccattcctccctggtgatgtcttttggacgtataattaataagaaaaccttggggaaaggctgactttctaaatagctgtttttttcccctaattttaaactttgtcagaatgcatatttatactcctcatattgtgtgtgtgtgtgtgtgtgtctggaagtgcaacaaaggggagatattatctgatacatgtgataaatatgtgcatgttcagatgtactatttcattcaattcaaagtttttcataggcaaataccagtgtcttcttgacatgctctgtgattagactttaagcattctttacaaccacagggcttctttctccttaataatttggtctacttaatgtttcccaattaccttgtagtttttgctttccaaatcagtgtttcacaaaatgattcatgaaatgcctacatcagaatcacctgtagtgtttattggtgctatggtttgaatgtgtcctccaaagttgatgtgttggaaacataatcccccatgcaacagtattaagaggtgggactttaaagaggtgattaggccatgagggctctaccttcatgaatgtattaatgcccattatcaaagggcctgaggctgtgagtttgctctcttgctcttactgctcttctgccatgggatgacacagcaagaaggccctcaacagatgccagcatcttgaaattggacttcccaaccttcagaactgtgagaaatcaattttttctttataaattacccaatggtattctggatatgtgtgtgtgtgtgtgtgtgtgtgtgtgtcagagtcttactctgtcacccaggctggagtgcagtggtgtgatctcggctcactgcaacctccgcctcctgggttcaagcgattctcccacctccgcctcctgagtagcttggattacaggcgtgtgccaccacgctgggctaattgtttgtatttttagtagacagggttcaccgtgttagtcaggatggtctcgatctcctgacctcgtgatctgcccaccttggcctcccaaagtactgggattacaggcgtgagccactgtgcccagctggtattctgttatagcaacacaaaatagactaagataactagaaacacagatgcctgtttttcatcccagacctgaatcagaacttacagtgatggggcccaagaatctgcattataacagtgcatgctgaagtttgagaaatagccataccatacgattctttttaaatggtctgtcttccagtccccctctgtctattgaactcctactcatgttccttaggtaaaagttttcacttttgtaaacactcatggtacttcctccccccaccccccaatgccgccagtaagttttcagttttcaccttctgctttattttataagagctttgttctcaaattgtttcaagttcctggagggtgaaaaccatgtctaaatcacatttgtatacttccagcacctttgtgcatagtaagaactcaagaaatgtttagtgaataatggttcaaccctagcatcagacttttattatacctaggaaacttttgggtgttagggttttttttttttccccatttagctgtgagatatgcttagcctatttgttatatggtgtttaggctactgtctaaggacatttttatgacctaattattctcactgacttttgcttatgcgcactttctcatttgtttggtaatccaatatccttgatatagatgctatttggttttcctttttatatatctttatgtgacttgagtgggattttatccaagtatacttgtgaatcttctctcctttggtttgagaagaggagcagaaatagtgatccattttctgcctttttaaggaatttttttgttttgttttgttattgtaatatttttatttgtcctagtgtggcggttaatattaaacatctcttgaatatcattggcaattaatgggctaactatgggcagatatgttggtgagaaaatgaaaaaaaaatgtagtcatggataaattgagtaaagaaaccatctcaaaacagatatgtttaagtgtaatgtgataacatatttcttggtttttgattcttatattgctaatttattaaagaatcaaaatgacaaatttatgcagcttatgactcattgttttcctgaatttagttagttcaggcttactatagatctagcggctgctgttttcacgtaattaccatcttatgatctagagtggttctctatgtaatttacttactggactcatggagccttccactgcgtacctccctctccaccataggcaggagctgtgccttatttgttattgtatccataggattaacccagcctaaggtttggcacatagtaaccagtaagtacctcttgtttgaattactttaattattatttttttgtttgtttgtttgaattattttaaaagaggaattaagatgagttttctctttagggctggttgtagtagtcccatgtactgtggacactgatgcgtgggaattgcttgagccaagaaggtcaaggctgcagtgagctatgatcacaccactgcactctagcctgggtgacagtgatacctcatcactttaaaaaataaataataaagggttttttttaattaaagaatttttctctttagggaatactttaatttgcctttacagcaaaatgtccatggaaattattgtcaacactgagaattctttatttctttgattattacttttgaaaaattatgagttttagctttggtaaatttattctgattttcaacatctgtagcagttcttaaaaaaattataaaattctttcatgactgtaaattttaatttttacctaagtaaaatatgcatgtgcttatttttgttttctagttatatgaaaaggtgatatgtttattttacttgtaccaggaggcatttatggtgactaggattcagataggatgatttgtttattttggctcaagtgttgacaagctggttgcgtgccacattagcatccgtgcactgctaagcctcccagatgatggcaggtgctcactgggaacaaggctggtggactccttggcccttggaacagaagggcatacgtaagttcatgtggattcattttagaagtcatatagggacgacaggaaaagcactgtaccaagaaactgagaagatgtgagagttcagttacaggccaatggagtttgggggtgtggacaacagtgtgaaagccaaaaggagttgagtcatgccttctgaagggtgggtgttcccagcaattctgaagcaggcacaatgagccaaatgtttctcatgccattgccaccacagatgagtccgaaaggaacatggggcaaaaggtgttccttcctttcctcatccaggaaagacagcctctctcatgcattttagaaattatttggcttccttatgtaactattatggcacatgcaggttgccctatatcatagttggattgggacaagaatattaacacatgactgtaggacaaacttaccaagccaaagaagcaccacacgaaaggaattggaatttgaggagttcatggaaaaggaagttgcttactgggggtctgtgtctctcattcattcacttaactattttttttttttttttgagatggtgtcttgctctgtcacccaggctggagtgcagtggcgtgatctcagctcactgcaagctctgcctcccaggttcacgccattctcctgcctcagcctcccgagtagctgggactacaggcgcccgccaccgcgcctggataatttttttttgtatttttagtagagacggggtttcaccgtggtctcaatctcctgacctcgtgatctgcctgcctcggcctcccaaagtgctgggattacaggcatgagccaccgcgcccggccattcacttaactatagtttctaaagagcaagtatattcaatacacatttttaaaagtactttgatacacttcccaagattatttcttctaaagataaaaaagaaaagttactctgtcaaactttaatggtctcaaaaccacaaggtgtgctcttaagaacaacaacatgtgcttggttttataaattcttttagaaaaaagtaaagagaaacatgaagtaagtgtaactcattttacccaagcttttctattttattggaaaagcattaagctttctctttttgttctcccttcccctagtatataaaatttatttaaattgaatggataaggttgattttatctatttatgtatttatttatttttgagagagcaagaccacatcttaaaaaaaaaaaaaaaagaaaaaaagaaaggatgacttatttaataaatgttggtaacatagctaggtaccagaaagaaaatagttggccctccatctaacatttcttgtaaaacatgtcaggtggaattaggatccaaatgtaaaaaataaaatatatatacatgttagaaggaaacattaagagaacatctgtaccactttgggtggagtgagaggaccttctcaagcaaaattaaaaacagggatcccataaaggaagagattgccaaatatgagcaaataaaaattaaaaattagtgtgtggcaaaagtcaccatgaacagagtgggaaacaccagacagcaggctgggagggcgtgtttgtagcatttgacagtacacggcaggtggtattcagggaatgcctgcaaactaagtggcaggtgaatagtccattagaaaagtgggcaaaggatatgaatgtgtatctcaaagaagatttgcaattaccattttcttctttgcaaaaagcagctcaactttactgcaaaataaaaattgaaatgacctatgtaatttttgcccattagattggcaacagttgaaaagatgctaacattaaatgctagcatggggaaagggaccctctcttacatgactgaatgggagtatgaatttctgtaacttttttttgtagttttgtagtacatatttaaactgtacatactcttggggccatcagttatacttttagaagtatagattcacagtcccttattaaaactcttgaggacaattgtgttttcagattaaatggagataacatggtgcatatactgtacattatgtaacacctccagcagggtttaagagagcaccccataagtagacacattcatatttctagagagatcaaatgaatattcacatcagttcagatcagcttttgccatcacatgagtcaattaaaaatctttgaattttcagagtctcttggatttcagaattaaggataaggcctattaggcaccaataagtactgtaaagtaaaatcattaatacacaaccagatacatcagtggatgtttcttgcagaattgtaacagcagaaaaactgagagtactcctaatgtcaatcagcggaggaatggaatacattatggttcatttgtactctgtgtattatgcagctgtcaaaaagattgagttaggtttttatgtactgactcaataagatgatttgtttgtattgggtgagtaaacaatttgcagaaaaaatatatgtggtataatctgattcaaaaaaatgtggagggggctatctcctatttatgcagctgtaaggaggaaaagctttggaaggatataaaccaaactattgacactgcttatctcaggagggtaggatttgaaatgaagtgggagagactgttaactttttatgtgcttctatagttggactcactttgttaaaatgagcattattgttttggtaatcaaataaaatctttctcttaaaagaaaatacagtgagtcttacagagcactgacagcctggcaactccccactaaggcagagccactcaaagccattagggatcctgcttttcataattgatgcaaagtagggggcaggcccagagcgacgcttacaagtccagccgttgagcagctccttcattacttaatactgaagcctaataatttccaaagtgggctagcatgtgccccacagaggaaaaaacaagttaaacacgggctgttactgtgaaacggaaatttatttacctagggagtctttttaattgacccatttgtggtgaataatactgatttctctctattagaatcattgactaaaacagtatggttttctcttcctgggtgttacttgtgacacccattttgagcacatttagaataggtttaaaagtacaactacttccatcatactgttattttagtcaagttttcaagtgtatatgtccctagttcctggaagaaaaattactcaagacttagatatatctaaagctaattaatattatgtctccaaatagtcatcatgctgtttatttggttttatttcctaaatatgtacaagcatatatagccattccctgtaactcacatgcaaaaatagctttgtacctacatttttgagtatagattgaataagtgttaagaaaatgaaaaagattaagcacatcttatgacaaaacaagcccagaaggaggaagtatgtgaggattggtaacatttgtgtatatttgtttctttctttcaactttgacactgtaaaacattggcttttttgttttctttcctgcccttggataaaaatggctccacttcattttctaatgagcattgactcccaactagttttttagaggccagactcaaataagcttgttgaaccgtggtttacttgttttaaaaacctttatattggccgggcgtggtggcttatgcctgtaatcccagcactttgggaggctgaggtgggtggatcacaaggtcagaagttcgagaccagcctggccaatatggtgaaaccctgtctctactaaaaatacaaaaattagctgggtgtgggggcatgcaccagtagtcccagctactcgggaggctgaggcagaagaatcgcttgaacctgggaggcggaggttgctgtgagctgagatagcaccactggactccagcatgggtgacagagtgagactccgtctcaaaaacaaaacaaaacaaaacaaaaaaactttatatttacctaataaaggtagggaagttggatgcatgaatttagtgcatttaaacttttctgattaagaaactaaacactctttccttttataaataatttgcttaagtagcttggaatattacacctcaaaatttagtaactggggaaaaattccatttaaagccaagtgtagacagtgatacatttacatggtctactgttgtctagattacaggggaaactaagaaaatacagggatggaactgattgctctattctctcaatagcagtttgaagttgtgtgctgttctgtctctgccatttattagtcatggctgtgaagctggagaaaggaaggaaaaggtaggaacactagtagatcacacccctagatagtttagcacattttgtgtataaacgtacggtgtcattattaccgtactttcattttataatgtaaatatagtaggaggtgcaaattaaagcagtgttagtaatttaatagtgatagtatcagcttgattctaccatctcttccctgtccccactttgaccttctgccacttgagggccccacccttggcaaacagtcatgcacattgtttgtttgtttgtttaatttatttattttagagacagggtcttgctctgtggcccaggctggagcacagtggcacgatcacagctcattattgcctcaagctcctgggctcaagtgatccaaccgagtagctaggactacaggtgcacaccaccacacccaactaatttaaattttttttagtagagatgggatcttgctatgttgcccactctggtcttgagctcctggcctcaagtggtcctcctgcctcagcttcccaaagtgctggggttacaggtgtgagtcatggcaccagcctttgcactttgttatagggcacttaggatacctagtttgaaggagacttcaggtttgtttgcaaacatactacaagtacagttttctgtctctgtagattatcaagtatatttagttgattgtgcttttctgtgacacttggtatcagtaactaaaagcgtgcctttggagtaagtcagacctgagtgatgctcattgctgtttgctaaatataatactgtgactgaaataacttcattttaataattaagattactcttgattatgtgctgcataaatgttaacttcctttctgtagtgtgaactctgtattgtaggacaaatgaacatgagttatatttctttctttaaaacatactgcttgtcctggaaaatgaagtcagtcttttcaggttgttgagtagtttgggagcactgagctgtgcttgaattggtttgaaggtaaatatagtgttcagaatattcactgtcctccattactcatactgctactcttggtaggggaaaatgagaatgaaaagatagtgctttcctgaggccattctttgacctgtggcttagaattatgagtgatagatatttatttatattaaactctttaataaggtttaataaaagaggaggaggagagatgaaaagtagtaatgacgtcgaaaggcagtagattcataattgcatgcagtagtcatacagtttctctgggcctgttttttttatctatgagcttggaaaattaaagaaaatgacttcaaagtccccttctagtctcatttttcagtagcacatgagaaaaaagaaagatatatccactgctttagtgctttagtctgtttgggctgctatatcaatttaccttagagtggataatttataaacaacagaaatttatttcagttctagaggctgtgaagtccaggatcaaggcaccagcaggtttggtgtctggtgaggactcattctgtgcttcaaggatgcagctttcctcctttcgtcctcacgtggctgaaggggcaaggcagctcccttcaatttattttacagggacactaatcccaattgtaaggacaaaccctcatgacctaattacctcctaaagaccgtacctcttatcacattggggattaagtttcaacatgggaattttgttttttgtttttatttttattttattttttctttttttaggtagagtctcactgtattgcctaggctggcgtgctgtggtatagtcacagctcactgcagcctaaaccttctgggttcaagctgtcctcccacctcagcctcccaagtagctgggaccacaggcacataccaccctgcctggctaattttattttactttttgtagagatgggatctccctgtgttgcccaggctagtcttggactcctgggctcaaacagtcctccctcctttgtttgcctccccaaatgctgggattacaggcatgatgttttttaaaagccacaggtttcttgtcattttaaagcatcaagtagaattgtccctggctatgattataaaccgaccactgtagttagtacaatcatcattaaaatattttttagtaatcttaaaatctgtgatgctgtgattctcttccacttatctatgttgaacagctatgaagaaatatctgtagcctcattgaatgcaacggtagcactgaaatattagtttaaaatagaattatttaaaatatttcacaaaatgtgtgtgtgtgtgtgtgtgtgtgtgtgtgtgtgtgtgtgtgtgtgtatgttttttttttctttttaaaaccagtcaattttatcttggaatctgggtctgtgtgcatttcatcatttatctggcttacctggccaagcgtggtcactcacacctgtaatcccagtactttgggaggctgaggcaggtagactgcttgagctcaggcccttgaggccagcctgggcaacatggagaaatcctgtctttaccaaaaatacaaaacttagctggacgtggtgatgcacacctgtggtcccagctacttgcgaggctgaggtgggattgctggagcctgggaagtcaagactgcagtgagccgttatcacaccactgcactccaacctggcagacacagtggaccctgtctcaaaataatgaatgaatgaattaataaaaatatctggcttacctattatggcaaagctgaaagtcttatattttattacagagacagagatttctagacttttcctccataccagggtgctgtcacctggctgtctcctttgcattctttttaaatgaaggtaaagtgaagaaaggtcatccattcacccttttgatctcttatctctcataacttaaacattgcttccaagtatgtgtttcactcattccaaatactcgagggaagtgaattctctgtggacctcccctctatctttctctgaaacagtatttggatctgcaaatgtcctataatctgactgctttccacatctagaaaggaaaagtggaactctgagaaggctaagggttagttaccacaacagatgtgttttaatgttggttgatacgttcagatcaagaacttaagttctcagaaacaatccatgctttatttgataagtatctgctgaataccatgtccttctctgggaagagtttgggggattggctgcacagggaggaatgcaaagggggtggggaatgtagtgagaaggagcaagactttgaggatacttttaagtcagaatcagctcttaaaatttataggtctagggtacgagtataaatggagagccacataccatatatctgaatatttaagttataaccaagctaagaaactgttaagtaaaatatgttatctccctctaccttgtcaaatataaaattaatgtcctggaaacacagattccaatttagaatcctcagactccctgggattctgcactgaatatgataacatgggcagagctgggccagggaccccacctcttctcttccttcctccagctccattcctcaccgtaccaggggtgtggacactgcagcccatatgtccaagctctgcccatgctagggcacatgggtgcacacactggtgggaggatgaacccagggaagaacccacacaagctctggaggcaaggttggtgtgcagggtaaggaattccagtctcctgcttactcttagtatggagaaggcacttctccaatgggaatataatatgagccacatgtaatttcaataatatattcttatttaagccaatatatcagttgttatcagttctaaaaagttaatgagatagtttatattcttttttgtactcagtctttgaaatctactctatattttgtatttcaagaacatttccattaggactagtcccatttcaggtgcccaatgctacctggcacttgtggtattatactggaccttgcagctcttgggaaagggtgcccccgactccttgttctgtagggggcacttggcacctaggactgagggcagttctctttacgtaaagctagtagagtagtgttttctcatttagctgatgcagagaatggttgtatctctttctctttataattagaggtaggggtcattatcactttcacaatgttcgtatatacataaaatgaatgggagatacttgttaagaggttttttttctctcttccattttatttatttataaataatttatttatttattttgttttgagatggagtcttgctttgtcacccaggctggagtgcagtggcatgatctcggctcactgtaacctctgtctccctggttcaagtgattctcctgcctcagcctgccgagtagctggactacaggcacccgccaccacgctcggctaatttttatatttttagtagagatggggtctcaccattttggccaggctggtctcgaagtcttgacctcaggtgatccacccgcctcagcctcccaaagtgctgggattacaggcgtgagccactccgccaagccttcttttccatttaaaacttgttaactgcattttcctcattcagcgtattgctgctttcctttatcctcaggagtgatatcatcctagtaaatttgtttgcacaaatgaattaaacaccaccgccccgccacattattgacctatacttttccaaaagccaatgctttcatttctcatcttgagtaattactagctctgcagcctttctgttccccactttgaaaagttcacgtgctctattatgttggataatgtctagtggattttttttcttcctagaggaacttttttttaagttaatttaattggatgcaaattttaaaactggcccattctctcaaatggggaaaaatatctagaaagtggaatgctgtttttgtttgtactagagcagcagtttcatctgtgatgcctaggataaacattttatatcagatagagttgccagatttaggttaggggataggggaggaagcaccagttaaatttgaatttcatataaacattgaataacttttttcagtgtaagtgtgccccatgatgcaatgtttgggacatactattaaaaatatttattgtttatctgaaatttaaatttaactggatgtactgtgtttcatatggcaatcttatttcaggacttctttgctctcaaatattgaggaccttaagcaacatttatttatgtcaattatatatatcgatatttgctgaattataaatttaactaagaaatataggctgggtgcagtggcttacgcctgtaatcccaacagtttgggaggccaaggcgggcggatcacctgaggtcaggagttcgagaccagcctggccaacatagtgaaaccctgtctctactaaaaatacaaaaatcagccaaatgtggttctcggcacctgtaatcccagctacctgggaggctgaggcaggagaattgcaacccaggaggtggaggttgcagtgagccgagatcacgccactgcactccagcctagatgacagagctagactccgtctcaaaaaaagaaaagaaatattttagggtaggcacgatgactcatgcctttagttctaacactttgggaggccaagacaggcagattgcttgagcccaggagttcaggaccagcctgggcaaaatggcaaaacttcgtctctacaaaaaaaaaaaaaaaaattagctgggtttggtggtgcgtgcctgtagtcccagctactcaggaggctgaggtgggaggatcatctgagcccaggaggttgaggctgcagtgacccatgatcccaccactgcattccagccttgtcgatagagaccctttctcaaaaaaaaaaaaaaaaaaaaaaaaagaaagaaatattttaatgtatattaattcatttagacagtaataaagcatattaacataaatgatgtttttagtaactttttaaatgaaaaaacagtttttcaaaacaaaaatagtaagaaaagtgtcattgttttcttttcattttctttcttttctttctttctttcttttttttttttttttttttttttttacggagttttgctcctgtcacccaggctggaatgcaatggcacgatctcggctcactgtgacctccgcctcccaggttcaagcgattctcctgcctcagcctcctgagtagctgggactacaggtgcacaccaccacgcccagctaatttttgtatttttagtagagacagggtttcaccatgttggccaggctggtctcgaactcctgacttcaggtgatccaccggcctcagcctcccgaagtgctgggattacaggcgtgagtcaccacacccggccagagtgtcgttgtcttctattttggtgaatcttttaatatctggctggattctcatatctctttctgtattccatcaggtatgctattacaaaagcaggtactgtctggaagtctccactgaaatatgagagtgacagttaggtgtgcggaagaaagtggcacaaagcaagtaacatcttagtattgttataaaaatagtttgaacagccaggtgcggtggctcacacctgtaatcccagcactttgagaggctgaggcgggcggatcacgaggccaggagatcgagaccatcctggccaacatggtgaaaccccgtctctaataaaaatacaaaaaattagccaggcatggtggcgggtgcctgtagtcccagctacttgggaggctgaggcaggagaacagcgtgaacccaggaggcggagcttgcagtgagccgagatcgcaccactgcactccagcctgggcgacagagcaagactccatctcaaaaaaaaaaaaaaaaaagtttgaccatgtggatcttctgaaagggtctcgggtacctcctctggggtcccccaagcatgcttttagaatcactggactaggaataagaggctctgtaattctagcttgtgttttgcagtgattataaataatcagaatagtggataggcttttttttttttttgaggcagagtctcgctctatcgcccaggctggagtgcagaggcgtgatctcggttcaccacaacctctgtctcccgggttcaagcaattcttgtgcctcagcctccagcatagctgggactacaggtgcccaccaacatggctggctaattttttttgtatttttagtagagacaaagtttcatcatgttggccaggctggtcttgaactcctgacctcaggtgatctgcccacctcggcctcccaaagtgctgggattacaggtatgagccactgcacctggctgaggataagcattctttaagaaggcctaacggccctaatataaaacagtttaaaaacgattatccagatttaggaataattcttccctaagtgattttttttaaatttaaaatacaattaagtctattatactcagccatccaagtaaacaggtattatttaaaaatcaaggtaacactcaacctgtcaaataggtacatggtcagctttccatttagaatcaacttttatttaactatttagaatacagcttaacatatactgattgggttgaattgtgtttatttttagagtgtgtgtgtctcttctaggcagagtgcatactgtctaggattagacgtgggcggtttttaaaggagttagcataacgcagtcactaatatgattcttatcttacttagagatggtgtagaggtcgttgataggccaaatgtaagagtgcacagagaagtaaaaaattaaagatagcttctttaattgcttaagttgcttgggcaactgtgaaaatgaaagggctattaacaaaaatagaggaaaaagaagtgccagtttggaataaagatggtaagttcagtttggggctggaaatgtggggtagctcaggagaggagccagcatgtgataggactgagataattgctcacataggagtcaaaacatttccaaggaaaacagtgtagagagagcatgaaactgctaaaaaacctatctatgaagattacttcaatttgggttggggaagaaaagatgaagaaaaggaaggtaatacatgagaagagggcttaagagagctaagaagaagggtgtgtggtcagcagcatcaatcaagtactgtattgagatcgacgaatgataattggttcttttttgagatagagtgtcactctgtcgcccaggctacattccaggagtgcaatctcagctcactgcaacctccacctcccaggttcaagtgattcttgtgcctcagcctcctgagtagctgggattacaggggtgcaccaccaggcccggctaattttttgtgtttttggtagagatggggtttcaccatgttggccaggctggtcccaaacttctggcctcaagtgatccactcatctcggcttctcaaagtgctaggattacaggcctgagccaccaggcccagctgataattggttcttaaatttggaactgcgaagtcctggttaccttagagagagtattgttttgataagtttttattatttcagttttgggtttgagaaacatgaaacaggagtttttgacttgtctgaaacagcaccgactccagaagggctaacgccagctctgcctggtccctttcctccttcactggggccatttacactgtgttaattaagctaattgagatactgctagaaagctttctccagcagaattcacttcctgaaatattcaaccttattttagagggaaaagtttgtttttagatagaatgtttacattttaggtaaaacactggccttagagtcagcagatgtgcattccagtgctgctgctccttaacctctctggggcccccatttcctctttagttgaatttgggagttgggctagattatctcttaggctatgctaaaattatgatgttaatgacatttgtctcttttttcccttttgttttgctttattgtaataggttcaccaagttgaagagtcttaacctttccaataatcatttaggggacttcccactggcagtctgcagtattccaaccctggcagagctgaacgtgtcctgcaatgccctgcgatcagtcccggcagccgttggagtgatgcacaagtgtgtacttcaaaccccactggcgggtatatccagaagccccagggaagctgcattgggggtgtggcacatgagattagttaacttgttatgttgctcatgtaagtcttggccccaaatcaagagatcagggactatgtagtccgtatggagttcatatgttggatttgtactccttacagtcttgtaaaaaaattaaatattcttgtttagaactgaagatccctacagatgagtatgtctaaacatggaatgtgggttatgttctcatttttctgagttatattgaattttaagacttagaaattaattttaagaaataacaaggaaagcccaaaggatatctgaatcaattcatatcacagttagctcacattgctcccatttaagcctattcaaattgggaaaactagtcatgattttcattttcaataaaagattaagatgcttatctctgattatttctctttggtccattattgcctcaggccctgcccttaggcattttgcgaagaataatacattttctggtaatacggtctacacttatggaacttgtatgttgataataaagatgtaaaatttatatgttctctttgtaattcttatgttttctctaatagcttacagacatttttgttggatggaaactttctccaatcccttcctgctgagttggagaacatgaagcagcttagttatctgggtctttctttcaatgaatttactgacattcccgaagtattggagaaattgactgctgtggataaactttgtatgtctggaaactgtgtggagacccttaggctacaggctttaagaaaaatgcctcacattaaacatgtggatctaaggtaaccatttttgagaaatagatctcatttgagtggctggcttatattgcaggggtggggagtaggttattaaccaaggcaaacaagctgggtaattgaatgtgggcccgtttttctatttctgcctagagggaagaattatgattaatagtagggtttgctattactggaaactctcactgatgtatgtcttgaaggtctttgttttgcagattggaacccagttgagtgagagagctgttttttgttgttgttgttggtttttgttttttttgttgttcttgtttttttttttttttgagtcaaagtctcgctctgtcgcccaggctggagtgcggtggcctgatctcggcttactgcaagctccgcctgccaggttcatgccattctcctgtctcagcctccctagtagctgggactacaggcacccaccaccatgcctggctaatttttttgtatttttagtagagacgaagtttcactgtgttagtagccaggatggtctcgatctcctgacctcgtgatccacccgcctcggcctcccaaagtgctgggattacaggcatgagccaccatgcccgtcctgttttttgttgttgtttttaaagagatggggccttgctctcttgcccggcctggagtgtaatgatgtgctcagagctcactgcagcctcaaactcctgggctcaggtgatcttcctgcctcagcctcccaagtactcaggcatgttcagtttcatcagtgtaaaggagcatcaccttttgctcccctttcttctcctttcatatggttcagcctaggaaacctatacattccagtcccataaagaattgcttggcttcacctttcctcagaataaaggaatcagacctgtccctcctagggaagtattagcaatttgcagatataaaattcttaatttggaggtaaaagtggttataatttatctgatttttgagaatttcttggaatgtgacaagataaggaactctaaacactttgttaacttgctttctaaattgttaacattatttgcctcttgagttccttgtatttagaaaaccctcatattccagaatttgagccctattttattcatccaccagtggtagaacttcattagagccaaggacaatggcttgcactgacctcaggtagtaagaatgagatgatttctgagttacctggtacatgtagggagacatcatttttcttgatctgaattagcttacacataagatcaatctgaaatgtctggaagtaataaatcttagtaagagctttataaattcttcagattcatagttctaacttgagtttttagatgacatcacctacaggatatttaaataccagaatagacattagacactctgtaaatgttgcatgaccatgagtaactgcttccttcctggctcctgagctgaggaggggaaaatcagataggtttgttctaattctgccttaatactttatttgttgtttattgtttttgtttttgcttctgttttcagagatagagtatctgtctgtcgcccaggctggagtgcagtggcatgatctcagctcactgcaacctccacctcctgggttcaagagattctcctccctcaacctcccgagtagctgggattacaagtgcccgccaccacacctggctagtttttgtatttttagtgaagacaggggttcaccatattggccagactggtcttgaactcctgacctcaagtgatccacctgcctcgacctctcaaagtgctggaattacagacatgagccaccacacccagcctaattctgccttaatacttaaaatcaaagctagtggagtaatttaaggagagtcttgcttagtttctctaagtaaagggccacttttattcaattttttttccctttaaatggaaatggtacatcagattgattatttttttctttgcattgatgttgtttgagtttgatattatttcttctgtggcatcattaataattcctcctcccttctcctctttctcctctttctcctctttgtacaaagtgtggctgttacttcttggtcagttctctttctatccatgttttctgccttgggggttgcatatactctcaggcttcattttcacctttcatcttgatgttaatcattccccagtctttccctattccttctttgacttcttgagaccagttccacttaagctgccagctggataacttcttggttttccctattcacacatttaaccaaatacatgtaaaacagagttcagtgtctttcttactcaaccaattctttctcatggatttctttttttgctgatagcaacaccacctcattggttttccagacacacaactcttggctgattctgtcagctcttcttttacatgagtttctgtcttttatcccttcctttttcttctcactgtgactgttgtcttctacctgagccatttgcttccattgtgcagcctcccaagcaagcacaattttgctcagagcctgcggttctctagttcaaggtactcaagccctcatatttggtttcagcccactggtatgtgagtcatttgaggatgaggctctatctctgagctgctcatgtgtgggcctccaacctgtggtggcaagttaactatttgctacttttccacaatgagatgtgtacagaagttaagactaatattttagtaacatataatgatttgacattgccacaatatccaactgcattacgagttgattcttgctgtacagggaatcaactagttttttttattttgttttatttattattattattattattttttgagacggaatttcttgttgcccagactggagtgcagtggtgtgatctcggctcactgcaacctccgcttcccagatttaagcaattttcctgcctcagcctcccaagtaactgggattacaggcgcccatcaccatgaccggctaattttttgtatttttagtagagacagggtttcaccatgttggccaggttggtctcaaactcctgacctcaagtgatccaactgcttcggcctcccaaagtgctgggattacagccatgagccactgcgcctggcctcaactaatttagatgttgtcaaacttgcacagtgagttgcatgtgatgtgagctgtgtatgggttgtgtactatacatcagtctgtcatgaattacaactttagaaaataggtctccttcaccatagataatttaagcactgtttttatttatccttcaaccccagtgtgagtccttagtaggtccagtccttggttaattgcctcacccacctttgtagcacagacccttgcatcccctgccctcctgtagaagctattcaggcaggcaccaaacttgccctgtgctcttctgtttgatgcagaggctgttccattgcttcctcgcacctgcttttcttctcccatgtacacctgttccattctgcctactcttgggaatcagatgatttgcttccttttccatagcctcttttttaaaaaaccattctctacattttatacatcattcgtggcacttaccacatacctgtagttcctgtattttataaaacatatttgactctccttactaaattgtgaaatctgttgaaaaacaccttgttttattcatctcttactgcaacaaagccataggtcatcatcgttgtcaccatcaccatagcccttctacaggctggagtgcagcggtacaagcgcaggtcattagagccttgatctcctggacttaagtgatccccctccctcagcctcctgtgtagctgggatgaaaagtacacactaccacacttggctaatttttaaattttttagagagatgggaccgcagtttgttgcctaggctggctcaaactcttgggctcaagttgttctcctgccttagcctccccaagtgctgagaattacaggcatgagtaaccacgcctggccagaagggaattttcatcatattttgccttttaaaaagtttgtctgggccaggtgcagtggctcctgcctgtaatctcagcactttgggaggccgaggcaggtggatcacctgaggtcaggagttcaagaccagcctggccaacatggcaaaaccccgcctctactaaaaatgcaaaaattagctggctgtggtggcatgttcctgtagtcccaactactcggtaggctaaggcaggagacttgtttgaacccaggaggcggaggttgcagtgggccaagatcgcaccactgcactccaacctgggtgacagagcaagactttgccttaaaataataaataaataaataaataaataaataaataaataaataaataaaaagtttgtcctagttacatcatggtgactgtggtcaacaatatgttgtagttgtttgtattcttgttttttctttttctttcttttttttttttttttttgagacagggtctcactttgttacccaagctggaatgcaatcacagcttgttacccaagctgtggtgcaatcacagttcactgcagcctcaaactcctgggttcgagtgatcttcctgccccagcctctcaaatagctgggagtataggcacgtgccaccatggctggctaattttttattttttgtagagatggggtcttgctctgttgcccagtctggtctcaaacgaaccttctacttcagcctcccaaagtggtaggattacagagtttgagctaccacaccctgccataatatattgtattcttgaacaatgctaagagagtggatgtattttcaccacaaaagtgaaatatctcacaaataactatgtgagatagtgcatgtgaactagctagaattagtcacttcacagtttacgtatatttcaaaagtcatgctgtacacaataaatatgtacagttttatctgtcaattaaacaaataataaaacggttcatcctaagtagctgaattactgtgtgaacctgaaaacttggtatttcagtcatggtgagagttaacaacttaagccaaatgttagctttcttttttgttacattaactttgcttttgttatagatttttttgtctccttattaattcaatgcttattattttagtactaatacaatttcattgtattgaatgaaattgtgtgtggctctttcaagtgaagatgataaagccattatgaaggttatttgaagtgtagattgggaagaagatgggacatttgttccattcctgcagtctgttgtacccaagatgagatgtgttttttcttttttattctgtttacacattctagtaatctagtgagcatttggaaataagcagattgctgggtcaaggccagtttttaaatcttacaacctggaataaaaaaagagaaagagccaaaaaaacatcctcttagggccattggaaaaggccatatgctgtgcttgcgtgttgacaaatcccagctctttgctggaactcatccttgtgtttcagtggctttaggatattattcttaattcattttccataggtttattttatttttttaaaggacagaaattcactatagagaaactctagctttttcctgtactctagacttatattaatactccttttttctttttttttttttgagatggagtctcgctctgtcgcccaggctagagtgcaatggcgtgatcttggctcaccacaacctccacctcctgggtttaagcagttctcctgcctcagcttcccgagtagctgggattacaggcgtgtgccaccatgcccagctaattttttgtattttttttttagtagagatggggtttcaccatgctggccaggctggtctcgaactcctgacctcgtgaaccacccacctcagcctcccaaagtgctgggattacaggtgtgagccatcgcacccatcctatattaatacttttctaaacaagtgcatcatctcagcactttgctggctttgtaatggaaagtagatggtttttgttgtttgtttttaaaggagttagacatagcctaacaaactggaaattgacatttccatctatttttctcccttttgaagctaaatatgtctttgttattttggttcctagtccccattactacttattttctgatagttcatccacagcaacttcagtcagttagctcactagttcttatggctagagattccgccagttttcccctgtgccttgcttcatcacagaggtgttggttcccatttttgtccggcattctaagatttctcaatggattctagatgccggatttcagtattttctgcacttcactctatcaagcagtattttatagacagagatagttttggtggttcatcctggtcctgagcagttgggagtcatgtacttgcattcccatctctggtgctcccattcagtgtgcaactcttattcgttgtgtgactcccgtccattactgtttttccacctcaacctttaattccatgctactcatccgcctgttcatgcatcctctctccttcattaaatattcgttgtagttgtgatgtgcctaacagttgttctgagttttgtttcttatgttcttttcggtatggtgtagatagtttcacagttccttggatgtcagttcctagttctttggaagtcagtgcttaagtggaatttttttccctcttgaagtgaattaaggtaaagtcaatgtgcttattcctctcccagctgtagtggtgtcacttgtgtttcagaatatattgtgaaggttaaaacctcctggaattatagctaaaaatagatactctggctagttaagaaaggccggatgctgagattccaaaaatcatggagaactataatacagagagaactgagttctttctcgctatttctcatattagggtgtgcccatttacttatagcattgcagttaattatagtctctatgtcctttgccctcaaggttgaacgtaattaggaagctgatagcagatgaagtggactttctacagcatgttactcagcttgacctacgagacaataagcttggtgatctagatgctatgattttcaacaacattgaagttttacactgtgaaaggaatcaactggtcacattagacatctgtggctatttcctaaaagcgctctatgcctcttctaatggtatgtatcataggctacatcaaagttgctcttttggttccaggaatttacccagcatcattatttctgcttctgattattctttgctcaagtagttagtaaaatagctcaaattttgctaaaataaaagtcacaaaagaaaaatgctgacttattgtttaaaggactcaaaaaggaaaattttattgtccctaatttttttctcgtattgtgatttggataagttactcccacttttgatttgatttttctgcttaaaggaagagagaaaagtgaactatttcttgggctacattaccaagatctagagatctttactaccttattactaaatctggaacctttatttaatactggagaatgaaaggaagttttattttgactccattcgggatctccagtttcatgtttgactaacaaagaactcaccttaatataaaccagaatgttagctgggcgtggtggtgtatgcctgtagtcccagctacttgggaatgggaagctgaggcaggaggattgctggagcccaggaggtggaggctgcggtcgtctgagatcacactactgcactccagcctggttgacagagcgagaccctgtctcaaaaaaaaaaaaaagacaagaaaagataatttaaaaaagataaactagaatgatatatgcacaagaaggacaccataaagctagagtcttaatcatttaataatatttcttcctaagaatctgaaaatcagggcagttccaaaaaagaaaaggtagtatgggcatatgtttgctaagatgaaggtttccattccctacagtcagtaaactgaatgaaaacaagtgttcactactgcaagttgaacatatgtttatcacgcacttgttttatgcatagtgcagctcatgagctctgaaagatgaaggatttttcaaatgtgattactgttatctcagaaaaacaagccaagcctcaaataggtatattttctagtgtaatcagtttggctgagcactgaagggttataggatttagataaccagtgggaatgaagtaggaagaaagaatctgaatgtggcttgttcggcagttgggagaaaacagggaattctgaacccatagaagtaattaggggatgcatgcttttgtcagatggtcaagcattgcccttagcttagtaagcgatagagaaccagtagagactctaaagtggaggagacttgatggaagtgatgctttaaggcagttaatgtgaaaatagtgtgtacagaatgcatttatagaagaaggttgagggtaatccactactccactaatccaagttattgtgatgggcttcatgtgggttaatgggaacttgtagtcaagattacatatgttgatttgagacttacctgctcagaggtgatacctgaaaccagggaagtaaggtaactggaagagaggagagtgctagtaccaaaggtcaacttacaagcccctcacacttagctgcagccagactgggcaaccagataggagctgcacctgtgaattacttggtaattgtttagagaagcagaaggacatttacaaactactcttgtccaagaaacacagtgacaggggacagtggtgtcatatttcataaagtgttcaggaagtgtttcagatttaagtaaaataagtcatttgtgacccactggagtgctgtttcagtaaggtgatgagggcaaaagacaagaagcattacttggttttatggaaggacccttgggttttaaaaggatggtactcgtggttaatctttcagatgtgatacagcctgcataacaataagagcaacagtaaatggatagcaaagaggtaggaaattagaatgcatgatgtatttcaatctctgaagaagatcttgtgattaaaagttcttttttacttttcctgcactttcaaagttaaacaaatgatgtattgtacttcctaaactaaacaaacaatagagaataaagcacagtaatgacgttccacatacaaaaagagtctctatgtcatttgtatagtaatgtctttgtggggtttttttttttcttcctagaacttgttcaacttgatgtttacccagttccaaattatctgtcctacatggatgtttcaaggtaagaagtcaagtcttagagccctctagagtctactagaaaattatttagtaattctgtctgagcttatgcacaagtactttttaatattttgaaggtaaatgctaaaaaattaatgatttttactttattctctaaaattatatatatctattgattaaaatacatttgtagttcaaaccagagcatcaaagtgcctgtgcacaccaatttgaacacacatttggacttgaaaggtgagtaagttgagggccatatggcttaaagctctaataactcttttcattatatgaatcatatttttttgtctttccctgaagtaatgttaattttattttttattttcaaaattttttttcaaactctgccaagtcttaggatgatttaattttttaagtgctttatttctttggatttcttacaccccttgtttagacatatatctcttcgctaaaaattcttaggaaataatgacaaagcctatcaaaatagaaattctctacaacctgcttggttttcttagctcctttttgaatatgctaactattttaccttttatggtaatttgcttctgcagtgtattatatttattgcggttcccacaaatattatagtagactttttcttgaaggcacaaaggcttgacagtgtctacagtatgtatttataccacgtaaacttaaaaatttttaacaatgaattttaaaattgcaactcatttggaaggtaactccaaaggagatacacaaaaatgttctaaacatagggagtttgtggcccactcaaggtgacaactgttaactcatttcagggcttaaattctggtgtgtttattaacagtcaccatgctttttaatcacaactattgtatgatttgtcttctacagaattttgccttttatcttgagattacacaggcttagctattttaataatctattcaatcataattatgcaagatgtgtcagtacttagctattgggaaaatattacagttaaatttttattgggggaggagccaagatggccgaataggaacagctccggtctacagctcccagcgtgagcgacgcagaagacgggtgatttctgcatttccatctgaggtaccgggttcatctcactagggagtgccagacagtgggcgcaggccagtgtgtgtgtgcaccatgcgcgagccgaagcagggcgaggcattgcctcacctgggaagcgcaaggggtcagggagttccctttccgagtcaaagaaaggggtgacggacgcacctggaaaatcgggtcactcccacccgaatattgcgcttttcagaccggcttaagaaacggcgcaccacgagactatatcccacacctggctcagagggtcctacgcccacggaatctcgctgattgctagcacagcagtctgagatcaaactgcaaggcggcaacgaggctgggggaggggcgcccgccattgcccaggcttgcttaggtaaacaaagcagccgggaagctcgaactgggtggagcccaccacagctcaaggaggcctgcctgcctctgtaggctccacctctgggggcagggcacagacaaacaaaaagacagcagtaacctctgcagacttaagtgtccctgtctgacagctttgaagagagcagtggttctcccagcacgcagctggagatctgagaacgggcagactgcctcctcaagtgggtccctgacacctgacccccgagcagcctaactgggaggcaccccccagcaggggcacactgacacctcacacggcagggtattccaacagacctgcagctgagggtcctgtctgttagaaggaaaactaacaaccagaaaggacatctacaccgaaaacccatctgtacatcaccatcatcaaagaccaaaagtagataaaaccacaaagatggggaaaaaacagaacagaaaaactggaaactctaaaacgcagagcgcctctcctcctccaaaggaacgcagttcctcaccagcaacagaacaaagctggatggagaatgattttgacgagctgagagaagaaggcttcagacgatcaaattactctgagctacgggaggacattcaaaccaaaggcaaagaagttgaaaactttgaaaaaaatttagaagaatgtataactagaataaccaatacagagaagtgcttaaaggagctgatggagctgaaaaccaaggctcgagaactacgtgaagaatgcagaagcctcaggagccgatgcgatcaactggaagaaagggtatcagcaatggaagatgaaatgaagcgagaagggaagtttagagaaaaaagaataaaaagaaatgagcaaagcctccaagaaatatgggactatgtgaaaagaccaaatctacgtctgattggtgtacctgaaagtgatgtggagaatggaaccaagttggaaaacactctgcaggatattatccaggagaacttccccaatctagcaaggcaggccaacgttcagattcaggaaatacagagaacgccacaaagatactcctcgagaagagcaactccaagacacataattgtcagattcaccaaagttgaaatgaaggaaaaaatgttaagggcagccagagagaaaggtcgggttaccctcaaaggaaagcccatcagactaacagcggatctctcggcagaaaccctacaagccagaagagagtgggggccaatattcaacattcttaaagaaaagaattttcaaaccagaatttcatatccagccaaactaagcttcataagtgaaggagaaataaaatactttatagacaagcaaatgctgagagattttgtcaccaccaggcctgccctaaaagagctcctgaaggaagcgctaaacatggaaaggaacaaccggtaccagccgctgcaaaatcatgccaaaatgtaaagaccatcgagactaggaagaaactgcatcaactaatgagcaaaatcaccagctaacatcataatgacaggatcaaattcacacataacaatattaactttaaatgtaaatggactaaattctgcaattaaaagacacagactggcaagttggataaagagtcaagacccatcagtgtgctgtattcaggaaacccatctcacgtgcagagacacacataggctcaaaataaaaggatggaggaagatctaccaagccaatggaaaacaaaaaaaggcaggggttgcaatcctagtctctgataaaacagactttaaaccaacaaagatcaaaagagacaaagaaggccattacataatggtaaagggatcaatccaacaagaggagctaactatcctaaatatttatgcacccaatacaggagcacccagattcataaagcaagtcctgagtgacctacaaagagacttagactcccacacattaataatgggagactttaacaccccactgtcaacattagacagatcaatgagacagaaagtcaacaaggatacccaggaattgaactcagctctgcaccaagcagacctaatagacatctacagaactctccaccccaaatcaacagaatatacatttttttcagcaccacaccacacctattccaaaattgaccacatagttggaagtaaagctctcctcagcaaatgtaaaagaacagaaattataacaaactatctctcagaccacagtgcaatcaaactagaactcaggattaagaatctcactcaaagccgctcaactacatggaaactgaacaacctgctcctgaatgactactgggtacgtaacgaaatgaaggcagaaataaagatgttctttgaaaccaacgagaacaaagacaccacataccagaatctctgggacgcattcaaagcagtgtgtagagggaaatttatagcactaaatgcctacaagagaaagcaggaaagatccaaaattgacaccctaacatcacaattaaaagaactagaaaagcaagagcaaacacattcaaaagctagcagaaggcaagaaataactaaaatcagagcagaactgaaggaaatagagacacaaaaaacccttcaaaaaatcaatgaatccaggagctggttttttgaaaggatcaacaaaattgatagaccgctagcaagactaataaagaaaaaaagagagaagaatcaaatagacacaataaaaaatgataaaggggatatcaccaccgatcccacagaaatacaaactaccatcagagaatactacaaacacctctacgcaaataaactagaaaagctagaagaaatggatacattcctcgacacatacactctcccaagactaaaccaggaagaagttgaatctctgaatagaccaataacaggctctgaaattgtggcaataatcaatagtttaccaaccaaaaagagtccaggaccagatggattcacagccgaattctaccagaggtacaaggaggaactggtaccattccttctgaaactattccaatcaatagaaaaagagggaatcctccctaactcattttatgaggccagcatcattctgataccaaagccgggcagagacacaaccaaaaaagagaattttagaccaatatccttgatgaacattgacgcaaaaatcctcaataaaatactggcaaaccgaatccagcagcacatcaaaaagcttatccaccatgatcaagtgggcttcatccctgggatgcaaggctggttcaatatatgcaaatcaataaatgtaatccagcatataaacagagccaaagacaaaaaccacatgattatctcaatagatgcagaaaatgcctttgacaaaattcaacaacacttcatgctaaaaactctcaataaattaggtattgatgggacgtatttcaaaataataagagctatctatgacaaacccacagccaatatcattctgaatgggcaaaaactggaaacattccctttgaaaactggcacaagacagggatgccctctctcaccgctcctattcaacatagtgttggaagttctggccagggcaatcaggcaggagaaggaaataaagggtattcaattaggaaaagaggaagtcaaattgtccctgtttgcagacgacatgattgtttatctagaaaaccccatcgtctcagcccaaaatctccttaagctgataagcaacttcagcaaagtctcaggatacaaaatcaatgtacaaaaatcacaagcattcttatacaccaacaacagacaaacagagagccaaatcatgagtgaactcccattcacaattgcttcaaagagaataaaatacgtaggaatccaacttacaagggatgtgaaggacctcttcaaggagaactacaaaccactgctcaaggaaataaaagaggacacaaacaaatggaagaacattccatgctcatgggtaggaagaatcaatatcatgaaaatggccatactgcccaaggtaatttacagattcaatgccatccccatcaagctaccaatgactttcttcacagaattggaaaaaactactttaaagttcatatggaaccaaaaaagagcccacatcgccaagtcaatcctaagccaaaagaacaaagctggaggcatcacactacctgacttcaaactatactacaaggctacagtaaccaaaacagcatggtactggtaccaaaacagagatatagatcaatggaacagaacagagccctcagaaataatgccacatatctacaactatctgatctttgacaaacctgagaaaaacaagcaatggggaaaggattccctatttaataaatggtgctgggaaaactggctagccatatgtagaaagctgaaactggatcccttccttacaccttttacaaaaatcaattcaagatggattaaagatttaaacgttagacctaaaaccataaaaaccctagaagaaaacctaggcattaccattcaggacataggcgtgggcaaggacttcatgtccaaaacaccaaaagcaatggcaacaaaagccaaaattgacaaatgggatctaacgaaactaaagagcttctgcacagcaaaagaaactaccatcagagtgaacaggcaacctacaacatgggagaaaattttcgcaacctactcatctgacaaagggctaatatccagaatctacaatgaactcaaacaaatttacaagaaaaaaacaaacaaccccatcaaaaagtgggcgaaggacatgaacagacacttctcaaaagaagacatttatgcagccaaaaaacacatgaagaaatgctcatcatcactggccatcagagaaatgcaaatcaaaaccactatgagatatcatctcacaccagttagaatggcaatcattaaaaagtcaggaaacaacaggtgctggagaggatgtggagaaataggaacacttttacactgttggtgggactgtaaactagttcaaccattgtggaagtcagtgtggtgattcctcagggatctagaactagaaataccatttgacccagccatcccattactgggtatatacccaaaggactataaatcatgctgctataaagacacatgcacacgtatgtttattgcggcactattcacaatagcaaagacttggaaccaacccaaatgtccaacaatgatagactggattaagaaaatgtggcacatatacaccatggaatactatgcagccataaaaaatgatgagttcatgtcctttgtagggacatggatgaaattggaaaccatcattctcagtaaactatcgcaagaacaaaaaaccaaacaccgcatattctcactcataggtgggaattgaacaatgagatcacttggacacaggaaggggaatatcacactctggggactgtggtggggtcgggggaggggggagggatagcattgggagatatacctaatgctagatgacacgttagtgggtgcagcgcactagcatgggacatgtatacatatgtaactaacctgcacaatgtgcacatgtaccctaaaacttagagtataataaaaaaaaaaaattaaaaaaaaaataataaaaaacctgatccatcaaaaaaaaaatttttttttattataaatatataattataaaatcataaaactctttgagtagtgcttcatgcatttcctactacctatcagataattttatttaattaacttaaatcagacattacctaattagttttctttccccacccactcctcccaccccccagcaaccccaaatgttattttcacattttgaataagagcagtataggaagagtataggaatgggatttgcgtacatggatgcatataaatatcttgaacagttcttttctttttttgtttttttgagatggagtctcgctctgttgcctaggctggagtgcagtggcgcaatcttggctcactgcaacctctacttcctgggttcaaatgattctcctgctccagcctcctgagcagctgggattacaggcacacaccaccatgcctggctaattttcttgtatttctgtagagatggggtttcaccgtgttggccaggctggtctggaactcctgacctcaagtgatccacccgccttggcctcccaaagggctgggattataggcatgaaccaccatgcccggcccagatgtattttcaagaattagtcatagagttaaactactttttaaaaacagtgtaatcagcaaatggtagccattgaaacccctaagtgagactgaattggaaactcttgtgtcatgcttgtctctgaattctgcctcttaaatgataattcatcttcctgtggccactctcatgcccagaatcttcactataacacactacctcatccacctcccatgctgtcacctatcacagtgtttactaggtcaggttcctccatgcaaagttctaagttattttatcacttacagaagttttaatttttgtatgttggggttgtttttactaaagaatactttcaatcccctatcctgttgagatgttttagatattaacaattaaaaaaaaaaatgagcatgtcaatgtttagggcttcaaatccagaactgtatgtgcttatacagacactaagcagaaaataattccttctatttctgtattttaattgaggagtagatataattgcaaaattaaagaacataaatagtgcataattccaccaccctaacatcaaaattatttttccttttgctgtaatatcttataattcttatcccaagcatcatgttttcacagaattactcatctgtgtataaagaattgtcataatgtacgtactgtttgaaattctttgtgcctgatcattttatgtattttaaaaagaaagtaaaaagctaaccagtgtgactagggacacattcaaatagagtagtttatctaagtaatgatcaattcatttaatagttaaagacaccattagtttagttctctctctctcttttttttttttttttttttttgagacagagtttcgctcttgttgcccagtctggagtgcaatggtgtgatcttggctcacggcaacctccgcctcccgggttcaaacgattctcgtgcctcagcctcctgagtagctgggattatagccatgtgccaccacacccggctaatttttgtatttttttagtagagacagggtttcaccatgttagtcaggcttgtgtcaaactcctgacctccggtgatctgcagcctgggcctcccaaagtgccgggattacaagcatgagctaccatgcctggcctagttctcttttttatagtaactgtaattaccatctagtgcccaagtaaatgtttttaaataattaattctgagtcttaactgtcagtgaacttttcactgccaccattttaaaactgtttctctcccttcccatttgtccatggctgtgttttcatgatgacagctggagttgggaaatattttaatattaagtgtaaaaatacaaatttgaaaataaaactatgatatgccattgacttcgtgtgtttttatgttcaatataacacatattctccctgaacttggcataggtctatagaccctttaggaaagtaaatttggagctagactgtttttttagactttagagatgatacagactatgtaactatgtccttccttctttttaaaagtttaatttaacctaaagatagggtctcatgctgtcacccaggttggagtgcagtgatgagatcatagctcacttgtaaacctcgaactcctctactccagcagtcctcccactgtacccttttgagtagctgggactataggtgcatgccaccatgagcaactaattttttatgttttgtagaaatggagtctcgctttgttgcccaggctgatctcgaactcttgggcacaagtgatcctcccataggcgtgagccactgtgctctgcctcttccttactttttctttatttcttctccctatcacaattcatcttgcttctagagaaaagcgaatccacacattctttcgatttatgcccttggtactttggtattttatttgaggttttatttattctttgtaatcaatttgagtttagaaccacatttgaggacaaattcaaccaattacttttatgttcttgcatttaggaaccgcttagaaaatgtgcctgagtgggtatgtgaaagccgaaagctagaagttttggatattggccataatcaaatatgtgaacttcctgcccggtgagtattacagatcaaatgagaggatctcacaataaatgagcaattttaaaaattgctgattcagtgtttaacttggtatcataagcctaaaagagtttgctttaaaaactaatatggtgtcttttaccccatgtggtgtcttcaagttacacacttgcttcatgcagtgcagtgaggagtagagtgaggctttgactgtcagccagacttttcaaaaccatgcaggcagtggtgcttggtggaaatttttaagtaagccaaaaacaatctttgaagcaaacaatatgattggctcacttctggaatcttaagtctttcagaatcttccacctctgttcattgacttaacatgtctactttaaccataaataccttttgttctccctagactttaactttgacgggggaaaaagatggttaggtcatgaaacctagaaagagcaaactagattctctttttcttgttgtgaaatttgggagtagaaggttcaagaacttctctttccttctctctcttaaatatgttcttatttttattttataattttcacttcaatggcaggatttgcaaaacagccacgcgatgacttctattgtctgtaaatacagacagatattttcaagttgactaatcatggtccaaaatattagtggacttttagtgactagccatgcagttagtaaccaagagtctatccagtgctgtcctgtagaactttctgtgatgattgaagtgctctgcatctgtgctggccagtatggtatccactggccgtctgtggctattgagcacttgcaatgtggctaatgtgactgaggaactgaattttgtgtatccattaattccaattaacaaattcatatagttacttgtggctgcctcaacccaggtcttattatttccaccattctcagccagtcactgaacagaggaagtcagttatttttagctatgtgtagtcagaaacatcagtgaaaatattatagaagtatgtcaccattttggagtaaacttttactttagtgcacaatctttaaaggtatgtgatcaccattcctgtttccttacccagaagatatacttgcttggtaagcctagtaaacatgttagagttgagctgtccagtatggtagcccccagccagccattagccaagtgactgttgagcacctgaaatgtgactagtcctaattgagaagtgctataagtgtaaaatgtacatggaatataaaatattaataatagtgtacattaattacatgttaatatttggggtatattctgggttaaatgaaataatactctgagaattcatttacttgttcttttattctttcttttaatgtggctactagataatttaaaattacatgtggcttatatttgataacactgtgttagaatgtagctcttattaaagaaatctgagttatattttcatccctgaaaagctctgttaatttcattatgttctgcagcaatacattttacctgtaaatacgatccatttgaaagtgctttctgccctagaatattatgttgactgagcattcaagtgacccattgcagccatcaccattaacaagagggtgggtgtgtgtgtgtgtgtgtgtgtgtgtccatgcatgacccttttagtagaggaacaggaaaaatgaaaacagtagggaaaaaaataattcgttgaaaaaaattttttaccttatcttttcttctattttctttccttctattcttttttttttttttttttttttttgagacagagtctcagtctgttgcccaggctgcaatgcagtggtgcgatcttggctcactgcaacctctgcctcccgggttccagcaattctcgtgcctcagcctcccgagtagctgggactacaggtacgcaccaccatgcccagctaatttttgtatttttagtagagacggggtttcactatgttgaccaggctgttcttgaactcctgacctcaggtgatccgcctgcctcagcctcccaaagtgctgggattatagccatgagccaccacacctagccttttctattttctctgttctctttcccacctccacccctcaatcccacagatagcacattggcatccaagttctctgttttgctgaaggctacaaagatatattttatatattttttatatttgtatatattatacattaacatattatatatttatatattatatatttatatatataaacaaacaaattcaagataactgacattttatccaattttcctcccaaatttgttgatctttaatttgttctgtatcagaacaggctttttgagaatctaaacaaatgcttattcaatgcaaatcccaaatgctctattgttaaagaatttaaacagtattcttgtgtgtgtgtgtgtgtgtgtgtgtgtgtgtgtgtgtgtgtgtttaacatgtgggacaaaaagagtatgcattgtttttctgtttatagtgttgttcaattgcaaactctgtgtgagccctgttgttgatgtaataggcaaggctgggcaccgtggctcttgcctgtagtctcagcacgctgggaggccaaggcaggaagattgcttgagcccaggagttcaagaccagcctgggcaacactgcaagaacctatctctgcaaaaaataaaattagctagatatggtggcgtgtgcctgtagtcccagctacttggaaggcttgaggcaggaggattgcttgagcctaggaggttgaggttacagtgacctatgattgcatcactgcactccagcctgggcaacggagctgagaccctgcctcttaaaaagaaaaagaaaaaaaaaaattcaggcaaggcaatgattcattaaaattgatttaatactcatactttgtctatccaagtaaggtatataaagagtttgacagggccaggcacagtggctcatgcctgtaatcccagcacatggggaggccgaggcaggcggatcaactgaggtcaggagttcaagaccagcctgaccaacatggtgaaaccccgtctctactaaaaaatatgaaaattagctaggcgtggtggtgcacgcctgtagtcccagctactctggaggctgaggcaggagaatcacttgaacccaggaggcggaggttgcagtgagccaagattgcgccattgcactccagcctgggcgacagagtgagactctgtctcaaaaaaaaaaaaaaaaaaagagtttgacaaaagagaaattattagaggcggaaatgtattgaaaaggaaagaaagtattttaatgtttagacagtacccaaaagaattgaactaaacccaataattagcattcagtattcgtcctatagttgatcttttttatttggaaaaataaagataaaagattttatcaccttttagttatttatgtggtaaaggataatatatatatatatatatgatgaaccacatgctgagctaataggctggagtgaccattacagagactgccctgtggtaatggtaactgcatagataatctggcctggataatctgtcttgtcacactgatagctaaacctgccaactcagggatctttaattggggcctgtggtgtcacagggttgagacaggttgctagcatctttgtgagcaaagaaactccatttgctatttaaagtgaataaagttattccctaatgttatggagatttttaactcttgtggattgaaggatacaaaatttggattagacaggaagagtaagttcaagagacctattgcgcagcattgtaactacagttaataacaatgtcttgtattcttgaaaatagctaagggagtagatataaatgttctcatcacaaaaaaaaaaagataaatatgtgaggtaatgcatatgataattagcttgatttagccatcccacaatgtatacgtatattaaaacatgttttacaccataaatatatgctaatttgtgttaattaaaaattaactttaaaaaattgtgggcatttgtgagtgagatcagaatggtggaaaacaggaggtggatgaggaagcctcattctttgacagcagattaataaattaatttattaattaggcagattgataaattaattcttgatctaaagtgatcaggatgcaaattgtaacctcacttttccccaccccccagatgtctgtttaaacccagggcctgttttctctgtaatgttggagaagtctgaagtggtcataatgtagatttacattagattaacaagtattcatcatctctgacagttctggtgacctttacaagaaacacagccaagcttccaaacagctctttaagtctctcaagaaaacagtggattaagtacatgctgctctttcgggagacagtctctaccttggtctaggattaagctagaaaaaacagacatacagccagggaagtgaggcaaagaagaaataattaggattgtgaaataaatgcaactgaggaaaaacataacattttctcagtggacatttgtaaaagtttgattgaagaaccctttatttaatgcagatcctgtaggtaaagactgctcagttgtgtttactcagaatctcttatgggtaaagcacccagcattctgggacaatacaagatacaagccctactctggagaagcatgcagcctttgaaagcttgccttgtgaccctaacaagattagactgatctcttcagtgcgtacatctatagaacttgttttttgctatgtagagcttctttgctcaatatttgtttacatagttttttccttcctcctttttttgagtatatagaaagtattgaaacaaatagtttcaagtttgaatttatattaaaatgaatttgtagttgctccaagtgaatttgtgatttttggagaggtaattttaagtattctttactctttttcattttttggtcttttgtccctttttatacagcttattttgtaatagcagtctccggaaactactggcaggacacaaccagttggcaaggctgcctgaaaggctagaaagaacctcggtggaggtcttggatgtgcaacacaaccagctccttgagctcccacctaaccttctgatgaaggctgacaggtaaagccatttgtcttgtttatcatctgagtctataaatattccctcatttgtatctttgtctttcgtgacctgagactgtataaactttctgagtatgtatctgtcccagatttgtgaaggaaatagttttgccagccactttactgaccattttgtaggcgatggagtcaggagcaacctatagattctttattaactttgctgctctctggagcaaagtaggttacattgtccataaacatgtgtcatggggatgtaggtgtaaaacaaggatgagaagtgtgctgctctgttactacctggtcacatcccatgccaggcttagcttaattatcttatgattctctgttcccgctttcacatgtttgggactttgggagatggagatgaattgtcccagagttagcttagttgttattgttttttgttgttggtggtgttttttgttttttgatcttttgagacagagtcgcactctgtcgcctacgctggagtgcagtggtgtgatctcggctcactggaacctctgcctcccaggttcaagcgattctcctgcctcagcctcccaagtagctggaactacaggcatgtgccaccacgcccagctaattttttgtatttttagtagaggtggggttttgccatgttggccaggctggtttcgaactcctgggctcaagtgatccacccaccttggcctcccaaaatactgggattataggtatgagccaccacgcctaggacttattgttttttaaacagtccttcttatctttatcataattaattccacattcaattcaattattttgttttgaacaaacaaaattttcctaaattacttgtatcatacactaagcatttgaagttgttttgaatgggagggagaggttaatttcaacattaaatgaagctctgttattttgttgtgataagttgccacatacagaattttctttaaagaaagctttaagtaacagtggctgttaacttactttggagcatcttgtttgcttcagaacccatgtgcatcattctcaagtgtttcataacctgagttattttgacttctgctcccatgtttatttttagggagtgaccattactttagagacaatatgaaggatctaacttttagtgtatctcataatgaagacaaaaacgttaaatttaattttgcttctagaagtgcagagaagagaaggaaatgatgacagatctttttaccttacaaaataaatgttagctatgtttcagcatgtgtcatattatgtgggtgaaatggccgtctgcgatctctgtctctcctaagccgaattagatttcccactgcatgttcctaactccctgagcttactcctgctgtaatactcatcacacactgtattgtaatttcttgttcacttgtctctctccattattagattactaacaccatgtggccagtgactgtgtcttaattatagttttatcatcaacatcttacactgtgtctggaataaaggaaagtgctcaaaaaatatttgtgtaataaatgatagagaatttaaggaatttcaaatactaccttcattcctggctttatatttttttcttcctcatcttttccataaatctttaataagagtaaaaaaatcttactacaaaaatatgacttacattcagtaaagtgtccaacttttaagcctactgctcaatgaatttttacatatttatggaaatggttgcaaggaccaccttacccagaacaagatatagaacatttctagcactcttctttttcctttcgttctgttttcctcacttaaaaagaaaattattttcagtgtactcatgtaagttataacgaattccaactggaataattataaagaaacaatagaactatgagaaaatgggattgtcatattgtaattggccagtactgtgtcatcctcctggtaaaaagtgaaatgtttcaagatcattgaaagaattcttgttttttggttttgggttttttgtttgtttgtttgtttgtttgtttgttttggagacggagtctagctttgtggcccaggcttggagtgcagtggtgtgatctcagctcattgcaacctccacctcctgggttcaagtgattctcttccctcagcctcccaaatagccgggattacaggcgcatgccaccacttccagctaatttttgtaattttagtagagatggggtttccccatgttgaccaggctggtcttaaacttctgatctcaagtgatccacccgccttggcctcccaaagtgctggggttacaggcatgagccaccgcaccaggctagaattcttgtttttacgttaatatcaaagcacagtgtgcagagacagatcactttagacatatgctttttggttgtgaatactataaaatttgatttcttctcctatggagaattataagttatatcataatgagaatccacttgttcccctagagttctacgctgaatctgtagaaccaaataaaggaatggatttaggttttaggagcctgaatgaaataaaaaccatttctgaatctggccaattctggtaagttcacaactattagaggttatcagtgctagaatttccaatagataataatcattctttattcattcctgagaatttgattttacaaggacgtttctgtatttcattctctggagactgtattttcatgtttagatgtgtttggacaaggatttaagtaagaacagttgtagttttaggggattgtggtgactcccaggattgagaaccactgccttcattgttggctttgtaattctgtgcaggtcattctaaacctgggttttctcattttgcttatttgtgcaattcccaaacggtacctgtatgttggaaaaggaaggattgtgtgaactggaacgtgaatgtgaactgaacaaagatgtgaactgagccagtggaaggacactgctatcataagctaggccagcagtgttagctaaaggcatttaggcagaaatccccatacaaatagactgacctgtctacagccagctgcatttttgaaaacagggaccgtgggggacaatttgccagcctttggaggctgcgaggggaggacagggcaggataaatgcatttctggcacaggagagttctggagtaaagggttgggggaatgagaaggggcaaatatctttgttttattttatgagagtaaaacaaatgaccaaaaaatgggagaaataagaaactttttcaagaagacatactcctgcacctttgttttccaagctgtaattgctacatctccagcatagcatagcaactgatatagtagaatcagagagaaaagttaagattgttaattatcttgggcagacaggattatgtgaagggggtgggataaatttgattagctgtttttttaaacctatttttgtattagttcacttgttagaagataagaaaaatcatattttctaatgatttccaccaaattattgcctttaaaggttaatacttagcctctttgcacaacctcaataatggaaatttttacctacctatttttaaaaattttattacttttttttattgaggcataatttaaactcaggaaaattgacaaatatcgtgtatttggtttgatgagtttgagggggaaatgaataaactagtactgacagttgttgaagtaggccaacccggaaaacatgaaatttaaaatattaaagacagtttttaggaaagattctttgtgactggcttcttgcaggtggtttcagttgtgatttgtttttgttcacatggttcaatgtagcagacatctcaatgagtttaaatcactgtgctggatgcataggacattgagaaatgactaaacataggaattatcctcaagaagcttacaatcgaatgaagagtttaaactaactgcacaataaactatagtgaaaggtaggtttaagaaggtagaatagacggaaaattacacggttggtctagtataatttaggctcatggtataatgagcaacattttgttgttggatgatacaaagctgtgtgtttggcaaatagctgcaggcattggtgagactttgcttcagttgcccttccattcagtttgctacttaatacaaatcttaaaaatatggaaattccttttttatatttttttgtgataataaattatggttacagttctgtgtttcgttatataactgaggaaagggctttatatgtttcagtggttcgtgttctgaagtagaacttgcactaccaagtgtcaagagaaatatcagagaagcatgtgttgttggacacagagcagaagaccatattttgactcatgagagttttcctttgctctgaattttgcctgctaaagccagtctcatagttttaattacgtgatactgtctgttaagtattacagggccagacacagtggctgacacctataatcccagaactttgggaggccaacacgggaggattgcttgagcctaggagtttgagaccagcctgggcaacatggcaagaccctgtcactacaaattgaaaaaaaaaaaaaaaaaaaaaaagtcaggtgtggtggcacacacctctggacttggaaggctgaggtgggaggatcccttgagcctaggagttcgaggctgccgtgagctctgatcacgccacctacactccagcctgggttacagagtgtgaccgtgtctcaaaaaatgaaaaaaaggtattacaactttagaatagtatatattaatctgctatacctggtagcaggaagctatttggtaaccaaataacaaacaggggaatctatgttacattagacaacttttagttatcttcatcttcctctaaatacttgaggaagatattctaatctagatcatgggcctagatttctcatttacctgtctttttaattagagttgaggattttcctgatggaaaccccaaaagagtttcagataattagttgtcatcaacagatgggtgcaaggagggtagacattctccatgggtcaccggagtggatgagacattgccagagggattgccatccttctgtttcttcctgaaatcttggcattggctgactccctgtccatctagcatctgcatgcacatttgatggccagaccgcttttcctattaaagtcagcctaattaacaaagccgaaaatggaccctttaaaggggagttataggtccctgctctgggagggcagccaggtctgtttttattcctgggtggactagtacaaggtattttcaggggcagaagttggggaagtgtatgttcaaatgagctttgtggtaattgctcatgtgtgcttattaaatattcccagagtattagtcacattacaggccataagtttcagtgactcagaatatgtgtaaatatcaaagggactaaaagggaacagaaaatttagaagagcatgatcgattgaccatgacaactggtgccttttggcaaagacagatatttctggcattttaaaaatctgagttgtaggcaactatttttttcagtgacgagggctatcttttgacattctgatgtatcgtgaagttctgatgttttgagagtgaagttctgatgttttcagagtcacagtggactaagatagtgtttctcaaagtgttttcagaatttcctagagtacttaccaaacatgcagattcttggctcttatctcaggtcttctcccttcgattttagagggatagtctgggaactgtatgtttatcaaggctcccccagtgactccagtgcagatggtctgctgaacacactgaaagcttaaggtgacccaggtactactgctgaaacaaatagatttttataaaagaaggattttaatggaaaaactgaatgtgtctagagatatttctagataacatatacatcccctctctgctttttaaagtgttgtgttcctcaaatattttaaggtatagttcttaaccagggttattacatcaaaatcaactgacaattttttcaaaactagagaatcagtcaatgatgtttagaatactatgaaggggaagagaattttcattcttttctctcccctatttctcccaaaaaaatctacctcagtcctggagaacggagttgggtgggggcattggaaagtggccgattatgtaatcttagcaaggttggagttctggtggcaaactccatttttcttaaccagaacaaaccagaaaggtttagccagaagcttccaagtattcctgtgttcagctgtgaacattgctctgagattgaaaagaggcccttcgtagattatcagaagagttctgcctgtactctgagagactgctttggtcatctttgcccctgtttctctgatgctcctaaaatggatgagatgggcgagtccaccctgccagtgaggggtgtgcgtatccccagaaaccatgaaaatgcattaggacaggggtttttgcaccacgatgattctcaactctgccagccatcagaattctgctatatagattttgaggccctaccctgacctacttaacaagaatatctccgagttgaagttgagaattctgcactaaggaaagctccctagagaattaggaagtgcagccagattgcaccctactgagctagagcatcttctgtgagaaatgttgttcctttagcagctccaaagtgtgatagcccccatcttaattcagtgagaggataatttataaataaaaagagaaataagcatcaattcccagcaattacactttgactgtatccatgctataccctaaggttttgtgtcaagcgacggcagattcagaaaaactggggaagagagaagaggaaagctggtagtggggctttaggtgggtctaccactaccacctaagtttaggtataagtaagtgcaacttgaagggatagcaagccagaaatacagtaattgaaggaaaattggcaattggattggtaaagaggaagcgaagcaaatggggaaaactaaaggttctacaagacaagtgaaccagaacatcagaggacacacagcccttccctactcagtccaaacaaagagatcccttaatgtatcttcacttatctgtgctgatagaagatatagcatcgaactaagaaacttgtaaaaacaacctgataccctgaaaatgactgggaaaaagatgaacagatccatattgggttattggctcccaaaataagaaagcaaaaaacaacatatgtccactgtcgaatagttcgtaccccaaaaaatctattgtgaagcctaagaaaactataagacaacattcccagcaaaattaaatatagtcaagtgaacattttatgatataaaacaaagaaattaaggaactgagaacaaagtggacaaacaggaagggctggaaagaagtgattgaactcagaaaatggaagaaaatgacagttatctgagaaatgaggagtaattacagggtgcccaagggagaatacacccgaaaaattaataagggacattaaagaaacaaaggaaaatgaagaggatgaaaataagataaagaattatttgaaaaagttagagataaaacagtggaaatggaagacagatccaaaaggcataacatttgtatatgtgtccttgaagaacaaagacaaaaaaaaaattgacagaactattatttaaaaataccattcaaggaattttttcaacaacaaacaaaataccttaaagtacatgtgaaaaagagtatcgattggatacctggaataaacccagaatgttccattttaaaacttattatattaaaactattagattttgaagatataaataattatgaccaccagtaaaaagataaaatagttttaaaaggcaaatatttagattgtcattagacttctcaaaaacattatacaatgcaaggtaataacggagtaatgttttttaaaaacttaatgaaagattgactcaaggtttttatatcaagccaagtctcctttaagatctaagttatagaaaactgttaaacatgtaagcaccaaaaacataagcaacaactaaaaaaatagataaattggatttgatcaaaatttaaaacttgtgtgcttcaaaggataccatcaagaaagtgaacgtgcaacccacagaaatatatctgatagggaacttgaaagaactcttacaattcacaataaagaagacaaatagctgaatgaaaaatatgctcacaggatttgaatagacatgtctcaaaagaaaatatacaaatggccaagaaacacataaaaagatgcttaacatcattagccattggggaaatgtaaacaaaaaccacaatcagatatgacttatacccactagggtggctataatcaaaaacacagtaacaaatattggacaaaatggagagaaactgaaacctcgtacactgctggcaggaatgtaaagtgatgcaagtactttggaaaacagattgtcagttcctcaaataattaaacacaatattacccagcaattctactcttaggtatatacccaagagaaatgaaagcatatatgtttacaccaaacttgtatatgaatgttgatagcaacattattcataacaactggaaagtagaactcaaatgtctaccacttgattaatggataaacaaactgttataatagatagtggaatattattcaccagtaaaaggtactagtatatgcagcaacatggataaaccctgaaagcagtatgctaagtgaaagaagccagacacaaaaggatacatgctgtatgattctttttatatgaaatatttggatttggcaaatccatacagatagaaagtagatccaggggatgtgaggaagggagaaatgatgagtgactacagatgggtatagggtttctttatggaatgatgaaactgttgtggaattatatggtggtgatggttgcacaagtttgtgaaaaaaactaaaaaatcactaagtcacacaatttaaaagggtatattttatattatgtgaattacgtccctataaagctgtttttttaaagacctcaaggacttagagatctgtgcacccatgatcccttctccaggaatctgctaaagctgttaagtctgattcaaagcctgtagtcacatgtagctttttaggtatacacacaccataaaattcatcctcttaagaaagtatataatccagtggcttttagtagtaatttaaataaattgtaatttataaatatgtaagagttaattcattgtattagtcaacattttaggtgctcagtagccacatgtaatagtgggtaccatgctggagagtgaagacatggaacatttctgtccacacagaaagctgtttgggcgtgatgtaccagaggatgaacttatcccaccaagaaataactagtatattttagcaaaaggaatgatagtgagcattttggtatatataaatgtagatttgagactgaaaggtgggaaagagggtggaagactaatatacaaaaagtggtgacaaactgttagtaacgcagcttgactgggagtggtggctcatgcgtgttgtcctagcactttgggaggccaaagcaggaggatagcttgaggttaggagtttgagacaagcctgggcaacatagcaagaccctgtctctacaaagaatttttaaaattagccaggcatggttacatacacttagagtcacagctgcttgagaggctgaggcaggagcctctcaggaatccttgagtccaggaacttgagggtgcagtgagctatgattggaccactgcactctagcctgagtgacagaccgtctctaaaaacaaaataaaaaataatgcgcttagaaatgggaagagagaaaaaggaaaaagtaaagtagaaggagcttatcgattgccatctaggcaataggtgtaacttacagaatgctgacaaaaactggcaagccagataagaaatgattaaataaaaatccaaggggataaggtcatttaataagacataagtacaaagataaccatagaacaaaaacacgaacttccttaaataccagaaaaattaatgtgttaaagaaggcataatatatatcctatagagagggaaacatggcaaatatgaatatgaaataattatgacagagttgagactcagatatatcagtacatgtgcttgaacccaaccttctattgccttcaagagacccatctcacatgtaatgacatctatagactcaaagtaaagggaaggagagagatcatgcaaatagaaaacaaaagagtaggagttgctattcttgtatcagataaaacagactttaaaccaacaacagtaaaaaaaaaattgcattatataataaagggttcaattcaaccagaagatttaattatcctatgtacatactcacccaacatcagagcatccagatttataaaacgaataccagacctaagaaaagagatagcgatacagtaaaagtaggggatttcagtatctcattaaacagactatcaaggcagaatactaattctggacttaaatttgacatttgaccaaatagacctaatagatgtctagaatactctatccaacaaccacagaatatacattcttcttatctatgcacagaacattctcaaagattgactacctgctcagtcataaagcaagcctcaacaaattcaaaaaattgaaatcctgtcaagcatcttctcagaccacagtggaataaaactagaaattaataccaagagaaactctcaaaaccacacaaatagggccgggtgcggtggctcatgcctgtaatcacagcactttgggaggccgaggcaggaggctcacgaggtcaggagatcaagaccatcctggctaacacagtgaaagtcccatctctactaaaaaagaaaatacaaaaaaattagccgggaatggtggcacgtgcctgtagtcctagctacttgggaggctgaggcaggagaattgcttgaacccgggaggcagaggttgcagtgagccaagatcacaccactgcactccagcctgggtgacagagagagactccatctaaaaaaaaaaaaacaacaacaacaacaatgaatacatggaaactaaacagtttggtcctctgattgactttggaataaacacaaaattgagggaattctttaaaacaaatgaaaatagagacacaatataccaaagcctctgggatacagcaaagggaatgtttataccactaagtgcctacatcaagaaaacagaaaaatctcaagttaacaactaattgttggacctaaaggaactagaaaaaacagaacacactaaacccagagctagcagaagagaagaaataactaaaatcagaggagaactaaatgaaattgagaccaaaaaaaaaaaagagtcagtgaaacaaaaagttggttctttgaaaggataaacaagattgatagactactcgctagattaacaaaaaaaaaaaagggccgggcacggtggctcatgcctgtaatcccagcactttgggaggctgaggcaggtggatcataaggtcaagagtttgagaccagcctggccaatatggtgaaaccccatctctactaaaaatacaaaacaattagctgggcatggtggcacatgtctataatcccagctactagggaggctgaggcaggagaactgcttgaatccgggaggcggaggttacagtgagccgagatggcgccactgcactccagcctgggcgacagaaaaaaaaaaaaaaaaaaaagatccaaataagcacaaattgaaaatgacagagatgagattacagctgatagcacagaaacagaaaagatcctcagagagtactgcaaatatctctacacacacaaagtagaaaatctagaggaaatggataaatccctggaaacacacagcttcccaaggttgaaccaggaagaaatcaaaatcctgaacaggccaataatgagttacaaaattgagtcaataataaaaatctaccaatggaaaagaaagccccggagcaggtgaattcacatccgaattctaccagacatgacaaagaagggctggtaccaatcttgttgaaactattccaaaaagttgagggggcaggattcctccctaactcattctatgaaaccagtatcatcctgataccaaaatctgacaaggatacaaaaaggaaaataacaagccaatatctctgatgaacatagacacaaaaatcttcatcaaataagtagccagctgaattcagcagcatatcaaaaagataattcatcatgctcaagaaagctttattcctgggatgcaaggatggttcaataaacacaaatcaatatatgtgattcaccacataaacagaattaaaaacaaaatctgtatcatctcaatagatgtgaaaaaagtctttgattaaaatccagtatcccaacatgataaaaactctcaacaaactaggcatcaacggaatgtacctcaaaataataagagccatctatgacaaacccacagccaacatcatactgaatgggcaaaagttgaaagtgttccccctaacactggaacaagacaagtatgcctactctcaccactcctattgaacatagtactaaaagtcctagccagagcagtcaggcaagagaaagaataaaggtcatccaaataggaaaagaggaaatcaaattatccgttcgttgatgatacgattctatacctagaaaaccctaaaagttcctccaaaagactctcagacttgataaacaacttcagtaaagtttcaggattcagaatcagcacccgaaatcagtagcattcctatacaccagtaactttcaagctgagaaccaaatcaagaatacaatcccatttacaatagcaaaaaaatgaaataaaatacctaggaatacatttatccgaggaggtgaaagatctctagaaggagaactataagacactgatgaaagaaatcagagatgacacaaacaagtggaaaaacattccatgctcgtggattggaagaatcagtatcatttaaatggttatactgcccaaacagtctacagattcaatgtaattcctatcaaactaccaatgtcatttttcatgaaattagaaaaaaattataaaattcatgtggaaacacaaaagagccaaatagccaaaacaatcctaagcaaaaagaacaaagtcttaggcatcacattacctgacttcaaggtaatatactgcaaacactgtaggtaatgaaaacagcatcgaactgttacaaaaacagatgcatagatcaaaggaacaaaatagagacctgggaataaagccatacacctacaaccaacagatcttttgacaaagtcaacaaaaataaacaatgaggaaaggacactctattcagtaaatagtgctgggaaaactggttagccatatgcagaagaatgaaactggacccctacctcccaccatatacaaaaactaaagatggattaaaaacttaaatataatacctcaaaggatacaaatcatagaagaaaaactcttctggacattggcctgggcaaagaatttatgactaagacctcgaaggcaaatgcaacaaaaacaaatattgacaaatgggacttaattaaactaaagagcttctgcacagcaaaagaaacaacagaatgaacagacaatctacagaatggtagaaaatatttgcaaactatgcaactggcaaaggacaaatatctataagaaacttaaataagaaagaaacaaccccattaaaaagtgagcaaaggacatgaatagacacttctcaaaagaaaaaattcaggctgccagcaaacatgaaaaaatgctcaacatcacaatcatcagagaaatgcaagttacagccataatgagataccatctcaacaccagtcagaatgactattaagtcaaaatataacacatgttgtcaaggatatggagaaaagagaacatacattgttggtaggaatgtgaattagttcaacccctgtggaaaacagtatgaagatttctcaaagagctaaaaatagaaatatcattccacccagcaatcacactactgaatatgtacccaaaggaaaagaaatcatttatcaaaaagacaccttccctgcactcatatgtttattgcaacactattcacaatagcaaagtcatggaatcaacctatgtacccgtcggtggtgaattggataaagaaaatatggtacatatataccatggaatactacacagccataaaaaagaacaaaattatgtcctttgcagcaacatggatgcagctggagactgttatcctcagtgaattaatacagaaacagaaaaatactgcacattatttcttaatacatgggggctaaacagtgtatacacatggccataaagccggaaacaagagacactgaggactctgaaagagataagggatatacggtttgaaaaactacctattgggtactatttggtggtacccaaatatttgggtgatgcctaaatgccagcattacacaatttacccgtttaacaaacctgcacatataccttctgaatctaaaataaaatatacatgtacttgaacttaacttacccccaaaatggaaacaacccaaatgttcctcagctcatgtgtggataaacaaggtgtagccatatgtgaattatgaattatatctcaataaagctgttaataaaaaaataaggaaaatagtacctcaggtatggagggatacttctttaacattatatacacacacacttagtcctaaagccaatttcttaatggggaaaccccattggtatttctactaagatcagtaacaggacaagaaagcccgttattttcactcttattcaatattatattagatatattagccaggtaattagacaagaaaagatcaattagaggcatgagcgttgggtaaagaagagagaaactatctctattgcagttaacatgatagtatacttggaaaaccctagagaatcactgataaatgaattcagacaacaaagtatttcaacaaagtagcagggatataaagttaatatgcagaaatcaaaagcctttgtatacacaaacatagccattggaagacatattatattggtagtgaaaatcccatttaaaatagcatcaaaggaggttacttaagaataaataagaaatgtgcaaaaactgtatgaataaaacgttaaaacacttctgaaatttgcaaatttgaacaaatgaaacaatattccttgttcttagataggacgacttaatattattaagatatcagttttttgtagattactttgcaaatttaacacaatcatcatgtaaataccaaaatgcttttatgatcaagttagacaaattgatgctactgttcatatggttaaaagaatcatataagaatagccgggaaaacactgaaaaagtaaaactattaatacaagggagagacaaaccttaccagacagctaaacatgtatgttttagttctttctgctgagaagaaggcctagaaatagtgacacgccagtaccaggaagtatatctaacatcaagaccttggtttttggccgggtgccatggctcctgcctgtaatcccagcactttgggaggccgaggtgggcggatcacctgaggtcaggagttcgagaccagcctggccagtgtggcaaaaccccgtctctactaaaaatacaaaaattagccgggctggtgatgcatgcctgtaatctcagctacttgggaggctgagacaggagaatcacttgaacccaggaggtggaggttgcagtgagccgagatcaagccattgcactccagcttgggcaacagagcaagactccatctcacaaaaaaataaaattaaataaaaagactttgctttttaagtatcattcttcaacaaaaggaatcaggtgtccttggaaacaggattgagtgtagggctagagcaggctgaatacaagatgagcccaaaagtaaagaaatgctcacaaaatgacgggagcatgtcaaaggatgcgtgagtcaacttgaaggagctcccagtggccacatttgggacaacgtgagcaaaaagtacacaatgatagtaatgaattctatccagcagaataaaataaacatcaatatgaccatactgaaataaagcaagtaattaggtaaataaattgggagagctcttgtaggataattccatttaacaaactgtaagtagagggaatcatgaaaatagaaaaatcacttggcaaacaacacagaaatgattgttacaagcacaaatgctaaattaatgggcaaaagtatgagaaacagaagagtttcatagtctcaaatgatctctccacacgttatttaattacaaaagaaaaaattattactttgcagtggagatgcttggcagacaccaccttaaccaagtaatcaaagttaatatctccaataataagacattggcctcacatatatcctgatgtgatgccctgagaagggcacaacctctgcgatatttttgccaaaaacgcatgaccttactctaatgatgatgaaacataaaacctaaattgagagacattttacagaatgtttgtcgagtacacttcaaaaacatcaaggtcatctaagataataagactgattggagaagaaaggaggactgataatgaaatacaacgtgaagtgtcagccttgtgaagatagatggaactgtcaaaagtactttgttataaaaacaagcaataataagaaacttggaatgtttacacttctggaatgcttcggagacagaaatcagagggttgcctaaaagtaagagttttgctggggttagacagttgtgactatgtagagttttaatggtatataagtcccagtacagatttccagaaaaatcatttttacaatacctggtatgtctacaaatagataaatctgttatggtaccaaatcctgtgccctgtttctaagagaatttggctgtaaaatttaagggtgtgctggaaattactaaaaagcaaacaaaacaaaaaatatatagatgagtcaaatggacagaatatgccaaggagagcagagcaattgctcaagaagcaggaaatggatttgtctcactgttgttgcgggtgactttccaaacactttagggcaggagccatatctgtgtgtcttttctctgagacttttgaactttatgctgagagaagttcttgagtactgtgctatttactaacttgttttaagaattgagtttgaaatgctgtgcacacgtggtcttcacattacatgcaggtgccctgcttgaccctccagctcttttagaaaaaaaggacctatgaaaatgtccccacaaaaaggtttttataattatttttcaacatttgaattttggagacacatggtagaaaactgtggacttgagactgatgaaatccgagttttatttctgtctctgccactagttactattgagccattgccaaataatgttactttctcagctttgagttttgtctttcgtgaaatatgagaggttatatctctggggtgatggaaaaatcaaatgagatagaaaatagtggccaggtgcagtggctcacacctgtagtcccagcactttgggaggcctaggcaggtgggtcacttgaagtcaggagttcgagaccagcctggccaacatggtgaaaccctgtctctgctaaaaatacaaaaattacctgggcatggtggtgcatgcctgtaatcccagctactcaggaggctaaggtgggagaattgcttgaacctgggaggcggaggttgctgtgagccaaatgccactgcattccagcctgggcaacagagcaagactctgtcaaaaaagaaaataaaaaagaagaaggaagaaaggtctgtggtgtctgtggaatctacaaagtaccttacaaatgaaaagaaaacagtcatatgttactgctttttctctaattagaagaggattgcatagtgaaaaatgttatatggatgaagcatgaaacagctgttggcacattaaaccatcttttttatagtatacttattacaaaattctgtaaggaagaagcttgaggatagttatcacatcatacagagttgagacctgactcagccctttaagaattcagcttttttgcaaggttgaaagcagagagtggggttctggagcctatttatttactaaaattgttaaccatcctggagaaactttgcaaaactaaagtatttgttcgttctggtggaaggatgaaatgtagactattaaaccaatttaaattgtctcctgctgaaacattgtgaggttttaggaagaatggcttaagtgaatgggtattgaatttaattttcctgatactatgataataaaaaatatttttagtccaattgtttgctctttgactattaaccagcaaggtgattaagtcagactttatgcagttcagatgatgtcctttggaaccacttcatgtggtttcaactaactagtttcatttcttggaggtggatgatgctggcagtttcccccttaattttgcataaaaggtatatagttccttaattacagacaactttcaaaaagatgagaggataaatctttgaggaaatcactttcttccctttattcagatgccatgaggggttttttaagttgcttggcagctttctagatgagcattcacttgtctgtttttaaaacattccctctttttctggcctaaaaaatatgcaaacatgaattcactttgttttatcgcatgtgtttgtgtgtgtataactacatatttcctagagaattctatttttgtcttttttctttctttctttctttctttctttttttttttttttttgagccggagtttcgctcttgttgcccaggttagagcacaatggtgcagtcttggctcattgcaacctctgcctcccgggttcaagtgattctgctgcctcaccctctcgagtagctgggattacaggtgcctgccaccacacccagctaatatttgtatttttagtagaggaggggggtttcaccatgttggccaggctggtctcgaactcctgacctcaggtgatccacccgcctcagccacccaaagtgctgggattacaggtgtgagccactgcgcccagctgagaattctattttaatgaaattattttatatagtttcccagccaacactagtccatgatattttagggcaataaaatttatttcttacattgtaatttattctaatgctacactaaagaaattcttaacaggaaattaggtggtctaaatgggatctaaagaaacagactcataaaaatactctaaacagcgatggtaaacaactatgttgctgaaacttgtttccttcctacttcaaaaccatttcagaaactgcaggagtgacctttatttccttctctgtagcacacacgactataatttcccgtgactatttatggtctggatagccgttctctaacttcctttttttttttttttaatgtcaacggaatacgtgtttctttaatggaaaatgttctattttggggaagctgcttttcctcagataagtaatggagttggtgcttgtgtgttgaaggggttgtacaagattgaagagttttaaattagtggactgagagcttgaagtgacagtcctggtgaggactcctagtagcctttttttttctctccaagattaaaaataactgcctggtattctgtattctttttaaggatgattttattctttttttttttaacagatggcagaatagtcctgaattgaatggtgaaagtttcaaaccaaagtgattgaaatgagggaatagtgtggttcatcaacagggttgatctgggggccagggggaggcatgggagatttcacccttctaactcttgtaggcaagtgctatgtactgagcactgtctctttcccacctgctgcagctgcacagttggacattcgtcatgaatcaggagggtcatctctgactcttgagggtgacacagtccgtccctttggagtgatttggaacctgatcacagcaaggatttgttgccattccccagctttgcaatgtgcatttaactacatttcacaatcaccgtggaggatttttttttttttgggcaattttacttatcttagttataaaaccattctttatattttatccacgtttctttttctttcttttctttttttttttttttttttttttttttgagatggaatctcgctctgtcgcccaggctggagtacagtggtgcgatctccgctcactgcaagctctgcctcctgggttcacgccattctcctgcctcagcctcccgagtagctgggactgcaggcgcccgccaccacacccggctaattttttgtatgtttagtagaaacagggtttcaccatgttagccaggatggtctcgatctcctgaccttgtgatccgcctgcctcggcctcccaaagtgctgggattacaggcgtgagccaccacgcctggcctttatcctcttttcactctagcatctgaaaagtgtggcagcaatatattatcttgtttgtttgttttaatgtaaaatttatttaagtacaatataaatacagaaaagaggccagatcataagtgtagcccttgatgcttcgtctcaaagtgagcacacttgtgtaaccagcacctggactaagaaacagaacattacaatatttgaaacgttacacgccgtctcctggatactgcctcctttccctccccacctaagagttactgccatcctgacttctgttactacagagtaattttgcctgactttgaactttatatagttatgggatcatgcagtgggtctcctcttgtatctggcttcttctggtcattatgtgtttgtgagattcatcctgttgatacatgttgttttagttctttattctcattgctacatcatattatgttgttttaatagagagcaaattatctcctgcacttgtgaaagccagtaaaatgtgctttggactttatactgaagaggactcaagtcactatgtgatttagttgcattgtgatctaatacctgttttattactataagaaccatttatttattatttatttattcacctaatttttatagaggcaggatcttgctttgttgcccaggctggtctcaaactcctggcatcctcctgctttagcaaaaacttttgattacaaaataggaaactgtttttctcttccttaagtcagaatattaactttaccatatcactttctcttccactccccgccaactataaaaataattgcttccccttacctttgtgcttccataaaaattggttgtatctctgtgtttaatacatatagatagctattgtggtcatgatagttagtgaatcacagatacaaatacttgctaattgaactccttgaagccagggcttgtcttttcaattcatgtttctgatcccagcttctaatatgcctggtatcaaagcttttaggtttcttgagggtttttgtgacttttcaatggcattttgttgcgttttgtcattgtagcctgagattcctgaacgcctctgcgaacaaactggaaagccttcctccagccacgctttccgaagagacaaacagtatcttacaagagttgtatttgacaaataacagcctcacagacaaatgtgtgcccttgttaacgggacacccccatttgaagatccttcacatggcctataaccgacttcagagttttccagcaaggtaaaggacagttgtaaagctgcgttctgaattgcatttctcaaagtgtattcatagaaaggtgaaggctgaaatatttatttcccaggtgatgtcaagtttgtttgcttgttcctgctcccttcacagtttcctttatgtaagctatgatgacatttccctaaagagaagtagattggttttcttcatatgtgtccaaagacctaatcacaagaatgttcttaagattttgaaataaaatgtgttgtttagcaggtatgttttttcttttacttctttttaaccagtcagattaattttttaaaaaaccattatcctagagccaggtgtggcagtgcgtgcctgtagtcccagctactcgggaggctgacatgggagggtcacttgagctgaagaattcgagaccagcctgggcaacatagtgagaccctatctattaaaaaataaagtaaataataaagtttccaaaaacattaacctaatagggtatgtgggaattagaatgtaaaccaggaacctgaaaatccttcattatctaccaaactttatattcatattcatgatgtacagagcagtggtagactctactaccatagaaactgtaacattgcaaattctggctctcaaaatagtccatttttaatttgtttttactttaatttctaattttcggtgagcggtgacattatatctagctttgagtgaatctgcgtgctgagcctgccgtgaggatttaccgtgtttccatttcattggcttttatccatctaacaagttagggcttgaacacacacccacgcatcaaagaaacaaacactaacccttctggtttctgcttggtaactgcaactcagcattggggccaaatcaaaacactatcatagcttccctctgctgccttcagggctaccagtctgttcgagcccttgctgaagaaggaaggcccgtgtatatgttgacttaaagtattgctctgtttttggtgtaatgaaatatttactttcctcctcatttgatattaataattaaactattttatgcttacttccatctacttttacttcactatggaatggggaaatgatatttttggaaaaaaccatgataatcacataacagcaacctatctgaaagagctcattgtcttctttcagatgatgaatgtctaaaccctgcagaggaaaggatcatcagctctaattctgaggatatacccccagtgacccgtgccaggtgtaatcacccaccctaagtgcagagaaacttttaacacaccttgtaaaaaaatccatctaggaatgaattctgtctccctgtggttgtgatgtggctcagtagctcccctgcaaaccagagcaccttaagagctgggtctgtgaccttgctgtatccctcagcctcacatctcacacaaggcccacacttaaatggttgctgaattaaagaacgggaccaccatctagtcattttgtcttcacatcttttgccaccttctttttatgtggcgagttggaaatttctttaactttttcttttgggggcctgttttctgtgcttttaatcatttttcatgcaccattacccattagtttcaaggcacacaagggctggcatctgcttctggtgagtcttcaggaagcttacaatcatggcagaaggtgaaggggagccattgtgtcacatggtgagagagggggcaaaagagatgccagggtcttgcgtgaatgcacagcgtgtgaattctctgattaccatgggaagggcatcaagccattcatgtggtatctgcccccatgaccaaaacacctcccaccgggccccacctctgacactgggaatcacgtttcaacatgagatttggaggggacaaataatccaaaccgtatcactatatttttttcaaaatatgatgataacatatttaaataatattctcagaaattcgggctatcatagatggattacttcatagtctgtgtacatattgtttgtagtctattctgataccacactggatgtatatgatattaaaaggtctgacttcataagataaaaacttagtttttactgtatcttaggcatatatttattttcaagataaacaagataatctttatatttgaaagatgacaaaaataatacagtggtttttttttgttaaattctttaaaagtgtattgtgacaaatgaaactataacaggtagaaacaataccaaaaaatgtaaactattattcagcttatgagtctggatcacactaatggggaatcctgtgcttcttggagtctaacatcagcaggagtggaaaaagggtcaaaaaagtgccagatactattacagtgattgcagaggtagaggcattgttttttctttcaaatttataaagaatgcaagaaaccctgattctggaatttttctttagttggttattgtaattattgatgaagattatagatgaggaggattgaacaataaaagacattcttaaacagaagtattaaattaattacattagaacatattattaagataaggttggagagattccttcttggtagatgtttagcaacaattgagataaatgtcttttggccctggtgtgaatttgggctctgccagaagtccaagaggtgatccaaatgggcttttaacacaccccttgctccttaccaccactttgtattcatcagtgatgtcagaggagttgggggagtgagggttgaagaaaaagcttatcttaatacgaactatagacctgttctctacctcccccttgagttttcagtgccactacaaagaaatcatactctctgagctcttttaaggcagttttattgtattagtgctggcttttgacccatttaaatagtgttttcattagtgttcagaccaagctatacagtaacatgattattgccagggtaacttaatttccacatagacttttaggaggaaaagggcatccattttccttcttgttgacaatttgaagagttgaatagtttttgttctgtagtgagaaaggaggtgttaaaatatttcagtactccaaaatgatagtgaaaaaatggtcttgtttgtaaaaatgactgttacaaatgaatccttaaagtcatagcaatttaattcatcctttgattctcgtcctatattattttcttttaaattgctttattttctctttttttagtaaaatggcgaaactggaggaacttgaagaaattgatctcagtgggaataagctgaaagccatcccaacaacgatcatgaattgcaggcgcatgcacaccgtgattgctcactccaactgcatcgaggtctttcccgaagttatgcagctcccagagatcaaggtatgtggtttcatttcataaactctaagcttcaggtcggcaaagaaagttgacttcctaactcatcaactcaggacgtttgcatctttgttggatttattcagaatgaaggcccccattagcccttacttcctccttcctaaccaatgggctacaccgttgagtcggcagagttaaaaaccaaagcaaaacactggagcaggttttgggaaaattggatttctaggctgagtccctcacttactgtatgacatgaggctacccacatagccaccctatacttctttatctgttaatagttgttccacttatttccagggtggttatgaggctcaaaggctgacgctggtgtaatcgcagtttgaaaaagttaacagtaccactacacatcgctccctaccaactcacccagttaaatagcacaccccaccatattagcccactaatggtaattccctatatagacagagcatcattgctgtcaccaaacattgatttcaacggaatgaaattggcagagcagatattattgtcatttgataagtaaggacactgaggtgctgaaaagtgaagcaatctgtgtaaattaagacagcaaattggtagcagaggtagtctgcaaatcctgactgctgacttgaggtagattcatgggatgaaaccagttcactagaatgaaagccatgtaacaaccatgtgttcctattttgtttcttttctggcagggaaatggtacagaagtaaaaagttctttatatacaatgtagtttttcatttgtatcttagcatttctagtaatcgattttatgcttaatgaaaaataatttggtggttacagacttggagcatattctaatctcctaacagggaacaagagcagtccaacttagccattcttcactttccaggcacttgctgatataaaccttgtgttttagattaagaaagcaaatagacatttgaagacattttaaatggcttgcataacttttttttgttttgtttttgagatggagtttcactcttgttgcccaggctggagtgcaatggtgcaatcttggctcactgcaacctctctctgtcttccgggttcaagcgattcgctcgccgcagcctcccgactagctgggattacaggcgcctgccaccatgcccagctaacttttgtatttttttgtagagacagggtttcaccatgttggccaggctggtcttgaactcctgacctcaaggtgatccacccacctcggcctcccaaagtgctgggattacaagcatgagccaccatgcccggccggcttgcataactttttatcacaacagtttttacacatttatatggttgagatgtgtacaagccattttgtttgtgtgtgtgtgtgtgcgcacgcatgtgcacgtatgctttaagccacaaaatgttttactttgggctttaagaacactgtctcatacatcacagtggcattttaagatgtttgttataaatttccagaatttggctgggcgcggtggctcacgccggtaatcccagcactttgggaggccaaggcaggcggatcatgaggtcaggagatcgagaccatcctggctaacacggtgaaaccctgtctctactaaaaatagaaaaaattagccgggcatggtggctcgtgcctgtagtcccagctactcgggaggctgaggcaggagaatgtcatgaacctgggaggcagagcttgcagtgagccgagatcgtgccactgcgctccagcctgggcaacagagcgagactccgtctcaaaaaacaaacaacaacaacaacaacaaaaatttccagaatttttactttctgtatagtaactttcacattgaggaagagccgtgctctgaagggagacagacctccagttggatcccagctgaaaattcactgctctgtttcctcgtatgttaaagaaagaaaagaattggtacttcctttatagtattgttatggagatgaaatgaaataatacatgtaaagcatttgaaataggagtgtcacataggaagaactccctaaatgttagccattattaatcaacacatgccctcaatgtggttcatatgtgatgttgattatatagagcaactattttggctgaagctcaacaaaatccaagaaatttattacttaagcaaatgtttatttgccgttcagcacaggaaagatgttgtcagctagaccttccagggtttcctcagctgcccattacttgacacagtggctgtgctgtgccatcttttactgggggttgttaaactggtctctatgtgtggtgcaggtgaaattctagcacaagagaaagtgagagtctcaagattaaacctcctatttgctggtcttagtgtctgtatctgtcttttaatgttataaactcttaaatgtagatttagattcttgttttggggttctttgtttgtttaagtatttggtttaaaatacaaatagaggcctggcttggtggctcacgcctgtaatcccagcactttgggaggctgaggcaggtggatcatgaggtcaggagttcgagaccagcctggccaacatggtgaaactctgtctctactaaaaatacaaaaataagccgggcatggtggttggcacctgtaatcccagctatccaggaagctgaggcaggagaatcacttgaacccgaaggcagaggttgcagtgagccgagattgcgccactgcactccagcctgggcaacaagagcaaaattccatctcaaaaaaataaataaataaaatacaaatagaaattcaggccaggcacggcagctccttgggagactgaggcaggtggatcacctgaggtcaggcttttgataccagcctcaccaatatggtgaaacactgtctctactaaaaatacaaaaattagccaggtgtggtggcacattcctgtagtcccagctacttgggaggctgaggcaggagaatcacttgaacccgagagggggaagctacagtgagccgagatcacaccaatacactccagcctgggtgacagagtgagacttcatctcaaaaaaaaaagaaatgtaaatgtttttagattataactagattttgcaaaacacaaattttgctgtatgaaaactaatcctctcctagactcttgcttggattcctggattacagaatcagtacctttgttgctattgaattccttcccctgttgtcttctctctgtacctgctttacaactccttttcaattttacttcccatatttttaaatggtttccatttttttgctctttggttgattttccccccagctattacaccttagcatttttcttatgttaacaatatccattctttcaggctgagctcctccattaccagtagatagaagttttgttgttgggattttttttttttttatactttaagttttagggtacgtgtgcactgagcaatatcaagtatcctttatgtacaaacatgtaaatgtttcatccctggacagatagtattcttgaaaaagatagtagttatattgtttcagaactctgaattgatatttttgtgtcatatgagaatattttaagttgcaatataagtatgtatatttgaatatctaaaagaaaatcttgtaaaaattgtgcgtatcttaaatgataaatatacctatgaaagtcttcattgtaaagtgtgcctatttttatgtattttatgtaaactaagcatatttttaatgtaaaagaagtaatttcatttctacggtgatatattccaacctgtattaaaattttattattgagttaataactctagattacattaacactgtttcttgaaaataaagtgcagtaggtgttacttgtaaagcatataaaggtattaagatcattgcaattttaaaaacttagcagataacatttcagaaaagataagatcatggtgtatttaactagctagtttcaccaagcattgctatcttttcagacattaaaagaaagtgattattcatagctttgttaccaaagttttaaaaacagttattgtttaaaagagcaaacaaatctccgtactgagatgtatgctaaaatatgtttttaaaacacctgaataattaattattcatgtacaccttaaacagactatttgcaccatctaatcttggataaaattgagctctggcatttttttcattttgataatatctaatgagatctgtaaagtgatcatcaggtgttaatttctgtatttggatagggaggttatgtaagttattagtaggaaaaataaaatgagtttttcagaattttccagtgagcctgagtggatcattagtgttattatcctcacctttgtttagccctttcgcattgatctttcaaacccctaccaccagtccagttttgcttggagcagattgtgttctcttttggttctgaaacagacaggcctccctctggatacagattagctcttgatcatctagtaaggaaaacaagatctgagtcacacagacgccagacttggtttggctggacctggacctaaggccatgctaaggctgctcatggctgaggaacctcagaagcagaggttggatatggcacttgtttctccttccactgaactgcatagcagtcacattggtaatatagtaattttgcaacaaaaaccaagctattagttaatagtgacctattctaaacccttcccccgctttttttgacataggttctctgtcacccaggctggagccaggtgttctaacccgtttttgaagtgtattttaagcaggtgaaataagtgttgatacctgcggtgaatgaagtttgtaatttgggatttaaacatcatgtcagcaacttctttgtcaaatttccatgttcctgtggcttactgattctaagaacagcatctttttagatgttttaattatctttagaagattattttcatgtttgttccatgcagtaataaactacttggctaagttgagtgaacttgtatctaaaatctgtgttaccttaactgggaaatggagtatgaagtagttttaatatgctatactcttgaggacaatggctataggaagtttaaaaaataaactgaatatagatcagctctcaatcagctagagagaaaaccacaatcccatagtcaccatgtagccagacttcgcttggctggattccagcaagccctgtttgttgttgttcttgtctctaaagtaaaatgaaatagagaatatcagctcaatcacaaagacacaaagaacatggggaaatggctgggtagaatggatggaagaaagtgggttgattcttggggaagtaggaaatggatatgaagacaggtcaggaaccaagtttaggctttagttgggtggcgtagttgacataatagacgtaaaaacgtcagcttggcataatgcatatccaaaacctgaaaccaggagcagtcattattatggtgctggaatcaagttaagtaatagttactgaggaaattttccaaccgttgcggaatctaatgtcaattcctgtttgggacaaggctcgatacaaggactaaggaaagaggaagcaagcagtgtctactggaaagtggccattgaagccactctgcacccagcctcaccaggaacagactagcaggaagttaagactgcatattctctctgtctttcaaaattggtgtaatgagttaacccagactagttttttttttttttgagttggagtctctctcgctctgttgcccaggctggagtgcagtggcacgatctttgttcactgcaagttccgcctcccaggttcacgccattctcccacctcagcctcccaagtagctgggactacaggtgcccgccaccacgcccggctatttttttgtatttttagtagagacagggtttcactgtgttagccaggatggtctcaacctcctgacctcgtgatccgcccgcctcgtcctcccaaagtgctgggattacaggcgtgagccaccgcgcctggccaacccagactagttttgtgtgtgtttgtttttaactctggtttcagcagatctttctaaattcaaagccatgcccattctaacaaaatattgcatacattttatggaatagcttatgtatctataaagatgaacaattagtccttcatgaactcatgcattttagaaggcatctctttagagaggcttctggagaaaggagcaccatgactcagtcctcagaagaagtgatctgtgaggtggttactgtggtgctcttcagatcctgagggcaaagggaagtgcactcacgcacccagaaatctgggagatgcctggaatcacttgtaaatttcttttcaagtctctttttcagtctaaaaatcatgctcattttatgttctactttttatcatttctcttttttttaatgtaaaaataatggctctttcccttctcaatctgagtaaaactaaagcccccagatgcatgtgccaggcatcctgtaactttgtagtataccattgagtacccccaagggcacacataattaattttttttttttttttttttttgagacggagtcttgctgtcgcccaggctcgagtgcaatggcgcgatcttggctcactgcaagctctgcctcccgggttcacgccattctcctgcctcagcctcccgagtagctgggactacaggtgcccaccacctcacccagctaattttttgtatttttttttagtagagacggggttttgccatgttagccaggatggtctcgatctcctgacctcatgatccacccgcctcggcctcccaaagtgctgggattacaggcgtgagccaccgcgcccggccataatcaattttaagaagtgctggtgggctaggcacggtggctcatgcctgtaattccaacactttgggtggctgaggttggaggattgcttaaggccaggagttcaagaccagcctgcgcaacatggcaagaccttgtctctttggggataaaaaaagaagggatgatgtaaagaaattgttcagtttatacaggatacattttcttaaagtcaaaatttgcagataacttagttttagtgtttgaggaaattctgtatttgaacaaacagaatgctaaggattgttaccctgcttgtcatttttatcacctcaaattcttgccaattttaaggtttcccaaggtttcttctaggcttcccaaatctaaaatgcagttgagaaaatcatggagacactgtatgtaaatttaaaaggaatgctttatacaagattaaaggtctttctttgcagctccctataaggtgaggaagtttaaacattaatgcacatttctcagtaattatatacaaatatgatttttttaaaaaagagggtcttgctctgttgcgcatgccggagtgcagtggtgcaatcataactcactgcagcctcaacttccttggctcacaggaagctcccacctcggcttcctgagtagctgagactccaggtgctcaggagcctggctaatttcttaaaatttatgcggagatggtcttgctatattacccaggtggatctcgaactcctggcctcaagcaatccttccacaacggtctcccaaagtgctggaattacagacgtgagccactgcacacagccataaatacaattttatgtagaataatagtactacactgtgactctcaggtctgtgtttagggtaaaagttgagttcagactgactcattcagttaataaacctacttagttgtatcaacatcccacgttagtgatcacttagccttttataacaccaggaatgtatagtagtttaagagaatttgactaaaagttgtatattgagaaatagtacatatgtgtgcatatttattttactattaagctaaaatgttctagttcctatagcatcataagaaagggaggcagtgtagactacttctgtatgagacacgatctataggatccacagttcattatctgatccctctgcctgcccagccttatcttctgctctggggcccaatagtctccagcctcagcaactgctcatagtgagtttcctgatatgccacacaaacgttattcttgtctccttcctgctgtacctgctattagctctctctagatgtccacctgttctcacatgcctgattaactttgattctgcacaaaaatcttctctggaaaggcctctctggggtcttgttatctgtccctgggctgctatgacctgtgcatacttctgccatatcgttgatcataccagctaaaggtgtattgtttatttccccccactatcttgggagttcctcaagggcagggactgtgtctgccatctccatatgtccctgatgatggcttattgcctgccgatttgtaggtccttaatacattttcttttgaaagaatacttgcatttatttacttcttatgaagtcagtagggaaatatgttatacactagcagcttttaccttgcaagggcaaggaaatccagactgtgattgggatcctcatttttggaactgactgtgccactggggagcacggtggaggtggtggactggggatagtctgcaggaaggaaggaagtagggtgttacagaatctagcagccggtaggttaagttgccatttcagggcagtacaggcagctatttggcagatgatatataatactttgctatgaacattgatatgcctgtttctttggtaatgttctgaggaaaacataataaagacaggctccatgcagcttttgtgatagttacacttaaactatacatcaagttgaatttctttttctttaagatataatgacttttttatgctcttatctaaatgtgtttgtaatgattttcctctaaatcaagagttccttctcagctatgagttatctcactttttctgagggttgcataattttttgggcattcttaccagaattttgattataacaaagtaatttttgttagctatattctagaatgggcctgaaagagggaaagataattttcttttagtcgtgttttagccagatttaacattctattgaatatatttttaagaaagttgtagtacactaaccatagaggtacatatattaacaatataaagggtctttttttattccagtttcactcaaatattttctatttgcttagtggtaaccattatgattcagccaacaagtgtttgtggagtacctcagcagtcagcctttgttgaggactattgaaagaacatgacagagtgcttctaagcgtgttgctcactgtgttaacactgggagagcagcaccagataccaacatcctgtaatttttttttcaactttctataatttctgtgaacgaacctccttcctgtgtgcagaagtataaaagggtgtttttgcttatctgccattaaagaaaatggttgcattcttatgtagaaataaactatgatatttaaaatgtattaaaattgcattaaaatgctatctattctatgctgaatttaacctaagcactggtatctcagttcccatcctagcagatttaattactgaaacaccttacaagagtccttcataaactcactgagaaaatgattgtcatgtgccaggcaatcatttgttcatccttttaatgaaaccatttgttgaacatctacactttccagtgcactgcgcttaggatatccggggagaaacagcagcaatccctgctctctaggaggccatagtctcatggaagaaataagtaagcagataattataacaagggacaccaaattgaaacaggttgtagtagagttggcattgagttgagtcttaaaaggaatcaggcatattgcaccagataaaaagcaagaaaagcatgaagaaaagagttccaagcacagagagaagcatgtgttaaggcacagacagatgaaagcatgtcacatgcatgagctgcaggcactctggcatgggtggaacatggagtgtgaggaagccagtgtgcaaagttggggatgccttgttggacattctgaggagtttggtgtcgggttgaaggacacctgggagcaggctgacggactgaagctggagtgtgagcaggtggagtaaaccacactgagaaaccatcctgacagcatacaaggagtacattgagggaagcaagaccaaaagcaaatttctggtgcagccagagccctccgggggaaatgggatgcaggtcagtccagggtagtggagctcgacggaagggaacctgctgcagtgaatcagagactctgtcacaggagccttggggagcaaacagtcctgggcagaggggaggcacaggaacatcatctctaagaaggtctgcattacagcctgcagcattatcttcataagtaattagttaccctactgaactcatttcataatttgataatttagagaatgagctagtttatatctgtagaaaaaatttttaccaatttcataaaattcaatatttctgcagaatgcctttaatctttgaccaaaggcattttctgacccctgaattttgttgtcaactacttgcatcctaaattactcacacttattagctctttatttcctgtcccatcagtgtccagtagattgtgtatatccccatttgttgtcctgctatgctgatgtgtactgactctgttggtagcatgtcccattattacccagtattatcgggtatcagtttttcattaaactctggttgactgttgatgtaaccattatttataattgaaaaaaacaaaacaaagcaaaaaagagatgactgttttctccaatatttaggttaagtaaattaatgtacatctactagaattagtatggggctattaaaggtggtggtatattagggcattcaggctgctataacaacatgccttagactggataatttattaacaacagaaatttcttgctcgcagttctagaggctgggaagtccaagatgaaggtaccagcagatttggtctgatgaggccccatttctcatagatagttccttccatgtatgcttgtcaggtgcaaagagtgaacaagctgactgggcctgttttataaggccactaatcccatgcatgagggcaaagcccttatgacctcatctgttcccaaaggccccacttcttaatactatcacgttggggattaagtttcagcatatgatgaaaatttgttgggggacaaacattcagaccatagcagatgggaatgaagatggggaaaatggttgcagtagagtgatagaagagtaaatgaaatgtaatgaaattgcacctatgtttgagatttttaaggcttttaaaaaatatatatgaataagactataaggaaaaaaaaacagaatgctaaccctgggtgtgttagggtggtagatttaagggtatatttttctgagcttttctttttgctcagctttttgtggataatgtggttataatgctctcataataaaatatgattatttagaatggcaatataatttttttcattgctactatttggaagcaactgtatgaaacattttgtgtgagagcattgtgttgtttgaagcctattgaaaatatatttacccaaaaatacaggttttcattttacccaatctctacccttccccaatccctactagatttaaattctttgagaatttttccaaataaaaggaagattttgtccacttttaagatcctgaagttcttgagtataatctccctcctccctttttttaaaggactgaagagagaacaaaacaattcccctctgatcgtttctgtaagcacttttgaaacttacaataaggtactaattcagccagataattgaatgctctccaccccatactatatactatatatattctgcattgttgtatctagagcgctgaccactccgtttctcttgtgtatgctgagccttctccacctaggttccctgctccctgaacacaagggcagcccctctttttacagtacaccttatttaagctttacatcagttttgtgagaaaggagctataatttctacttacaggtaaaacctgatttttttgtaaccaacatgacccttttgtgatttttctttcaagttaaattagggaggacctgttggagagtccagatgttgatgccttgagggtaggatccatacttgactcagcccctttttttttttgacacagattaggcaggcttacctgctcatcttgcttttgccaatttcttattcagtttcttttgaaatatcttctcattttgagtgtgtgttacctgccttttcctcattttacatgttcttttctttgttttttgtttgtttgtttgttttctgttttgttttgttttttttgagacagggtcttgctctgtcgcccaggccagaatgcagtggtgtggtctctgcaacctgcacctcccggattcttatttttttttttttggtgagatggagatttactcttgttgcacaggctggagtgcaatggtgcgatctcggctcactgcatcctccacctcccagaatcaagcgattctcctgcctcaccctctctagtagctgggattacaggcatgtgcctggctaattttgtatttttagtagagatgggggtttcactgtgttgcccaggctgatctcgaactcctgacctcaggtgatacgcctgcctctgcctcccaaagtgctgggtttacagatgtgagccactgtgcccggtgcacctaccgtattcaagtgattctcatgtgtcagccaccttgaatagctgggattacaggcttgcgccaccacctggccaatttttgtatttttagtagagatggggtttcaccatgttggccaggctggtctcaaacccctgacctcaagtgatccaccctactcggcctcccaaagtgctgggattataagcgtgagcctctgtactcagccttctttgttttttgttttgttttaagaaattcctttaaagttcattttaatgtttgagctatagttctcatggcacggagattttgtgagcaataagaaaatctattaggattttttagttaatgcttaattttaaacgtggagataaaattaagtgaaaaatataggaagaataaagaacatggattttctgttattcaaagaaaattaaaaaattttttttgcatttagcaaaatctattttaaatgtttatggcaaagtaacagataagcctccttttccacatttgtctagtgtattataatgaatggtcagactgatttgcatgcaaagagtaggagtatagaattccctgaagagcttctctagaccatctctttcttgtttgcacttgttcttttttcagtgtgtggacctgagctgtaatgagctaagtgaagtcacattaccagaaaacctgcctcccaaactgcaggagctagacctgactggaaacccgcgccttgtccttgatcacaaaaccctggaactactgaagtaagtattctgtaaagcactgtatccccatcattgtccactggcaatgggattcatatcttagtgaaaatgggaaacaaaatatgaagcatcattgacttgttagctgtgttaacacacacaacaggatatacaagatgcagggaagcaatgaacaaccaagatgtaacttaaatctcagtagtcactgataacgtggttgtgacagttaatgcaaatattaaggaaggattttaaaagagatggatgatgtagggaaaattaacagtgtagcgctgaaatccaggttatttaaataaaaccaagaatgcggagtagttagatcctaccaatagttagatcttcacggtttgggaaagaggtcattgatgctgtttcattcttgatattgataaaagaattagtggttggagttttctatgtaaaaccttaaaggtctgcagtaggaaagatgtcttaatgagaatgttcatcatggaactctaaatgtctattaagaattaaataatgttccacaattgaatattacaaagccatttaaaattatttagagctatattgctaactcaaaagatctttacagtatattaagtgaaaatattaataaaattcacaatgaagttttatagtataattcaatttttgcattataaatttgtgtgcattgggtatatgtacatgtgtatgcatacacacatctagaaaatgcctgaaaggatatataaaaagagttaaagtggtgttattctctggataatagtattatgggtagtgtttattttcttctttaaacttttctgaattttcagaattttttggggtatatcagtagcagttttaaacattgtcatacattagtcattatgcatgccatatatgtttattcaatgttggaatatttgttgccgaaagtcatcttccattatcttaagagaatcagaaaagaacggtagaattttggtgactggtccgttaatactatcctaggctgtagtgcaaaccaaagtttgaaaagcacttaaagtgattcctggatagaattggcctaattagtgcctaatttgttggcattttagtacttgatgagaaaattaattttgatacatagttgaaaaacactgcctgagtgtcctgaggaaggcgtagagaccgaggttctctccattgttgatcacatgtatgaaacctcggcctaaacccctccatctgtccacacctataagatgagaaaaaaaatggcctacgtgatctttaaggtactttttaagatcaagaaaacatggattatcaaaatacatcatctttaaacagatagcttttgagtattttttatacgtaggatacaaaaatttttgagcatttttttacaaataaaatttaaaaataattgcaccaaaatttgttaataaatggaagtagccacttagagaaaaattaaagttgcattcttatatcacaccaaaatccagctgaaatagttgaatctgtaaaattaaatgatttttaaaagtaataaatcatatgaatatcttcacaagttagaaaaagactttttaggccaagaaatgaagggagtaagtcacaagaaaagaaatcagtacatgtagattggtttcaatatttatgtcgtatatgtttacacgtaaatatactttttatacataaaagtgttaaatgtctatttcctatttcagaaactctcaagagtagatataaatggcaaatgacaaactaggaagagaaatacaaaaaataaaagcattaatatgcttactagaaaatgttcttatatgataagaaaagtactcaaaataaaccaaggacattaacatttaacagatgcagtacaaatagttacatgaaaagatgttcaaacttataagtatatcaagcaaatacaaaataaaatatttgaataacatttcccccctcaaattggtgctgctgaaggagtataatttggtattacactcttcttaaaagcagttgtcgtacgtatcaagctttttaaaatattcacttactcagaccaaagtttcctatagcaaaaaatcataatactcttaaaatgttaccttctgtttaacatctggaaggttgtggattcttaatgacttggaagattttccgtatattatttgcacttttagagggttggtttgttttatgtgagccgattaagtgcatatgaggactcttctgtgagattgagctgtggttcacagaactctgactcatttaaagatatacaagatggccgggtgtggtggctcacgcctgtaatcccagcactttgggaggccgaggtgggtagatcacctgaggtcaggagtttgcaaccagcctgaccaacatgatgaaaacccgtctctactaaatacaaaaaaattggcgggcgaggtgacgcatgcctgcaatcccagctactcaggaggctgaggcaggagagtcacttgaacctgggggcggaggttgcagtgagccgtgttacgctattgtactccagcctgggcagcaagagcgaaactccgtctcaaaaaataaaaaataaagatatacaagagtcagcattcatttcacttcagatagctgctcagccacactgtgttcagctaggtagagaagagaaattgctgcttcactagaaagaattatttgtgtgctggggagagggggcagttaagagttattttttttttcctttaataatcaggctaggaaatggaattatttctctgaagactttgtgttctgtaaaaattataaatgcctttaaaaatgagccttcacttttccctagacttcaggatggtatctaagagccttaggatatgtcttaagaaacctattgtattgctgactgttttagatggataaaatggagtaccaggtcatatggagagcaaataatggaggactgtccttttttttgttaatgcctcttttatttatagaattgaaaactttgaaaaaaagatttagctccagccttattgtaaaacaaggtattaacttgatttggggattttctattgacactatgatttatgtttttcaagacaagatggaaagtaaatgtttgctagtaattgagagtagaaacttttctttaaccatatatttttaaatttcagaaaaattgccatcagttatttctagttacaaagggaatacaagttagatattgatttacttcttagagctttaactggttcttaggaaggatatacagtatttgttagatttgggagtaatgagtaccaacagataattttaattcttgtggtcatgaccagaactatgtaggtgttgcttcagttgtcagcagataatacatatactttttcccttgtttaaataataatgagggggaaacttagtggcaatttacaagtaagaggacttatttcaccttgtggtagccagccttttaacagactactttacatctgttaatgactccctgtttaggggcacagaatgctttctagaggctgattttattttattttattttatgttcttttatgttatgttatgttatgtgttatgttatttattttttgagacagagtttcgctcttgttgcccaggctggagtgcagtggcacaatcttggctcaccgcaacctccacctcccgagttcaagtgatcctcctgtctcagcctcccgagtagctggagttacaggcatgcaccaccatgcccagctaattttttgtatttttagtagagacagggtttctccatgttggtcaggctgatctcgaactcccgacctcaggtgatccgcccgccttggcctcccaaagtgctgggattacaggcgtgagccaccgcgcctggcaaggctgatttttaagaaatgctatttgagaatttgtccctttagtatttctgttttgggtcctgttggatcaattatggcatatgagggctgaggagaggtaagaaatctcccagtttaaatacatacagttaacttgtaatttattaaatacccttcatttgctttgtaattttacatatatgttttattttatgatattagtcttagcatacttggctatacccgtgaggagagtattggaagctccagggaactgcaagtccatgataatatttggaggggttatatggacagaaattggatttggagatgaatattgcagaattctctcacatcatctaaatgcagtataattgtggcttaggtgttttgttgttgttctttctgagtattcatggtgtaagaatacacccatcctattacttaagttttgttttctcatgccaaggctgagagctgtccttgtcattcccaggagagagcagtcatctaaagtggaatgtgtgaaagtctctaatagctgctttacgatgctcattaaaactaattttcgtgctctgtatatatgcccctcagttttcattacaacgagtagctggttcttgttgctgataagtatttcagacacattaaacgcagtaagaaatggtaagtacagagtgtttaacaggtgtattttttatttcttggataaaggtagcaatttgcacacatttggttttaatgattcctgttccctccctgtttctcttgttagtaatatccgctgtttcaagattgatcagccttctacaggagacgcttccggagccccagctgtatggagtcatggttacactgaagcttcgggggtaaaaaacaagtaagtcagatgaaactttagaggaagaagtgcctcctgcctgtctcactcctttagttgggtagaaagaaactcagtgctgtagcacacacttttctcatgtaaaatttctttgagtattgcaagtttccccagagtgaggctccctcacgacttatgtttgaacattaagggaaggccctgtttggaatcacatagtctcccttagtaggagacgttgctaggatacaaggtaactgacacattatatctatgtaagactccagtgtttagaaaaggcctaagtattgaaatgcatccctgctcctttgaaaagctcctttatcttcctctgacgcttgtttaccaagcaaaacagagatagtattaaaggagaagtagcttaattgtgcatatttaagatcactcatgttattgactatggagctgtttttacaatctaaattagcttggcagcagtttgatgtccattgtctgtaatgtcatctgcttgtcttgccaccaggacttgcccatcttaatatctttttcttctccattttccccacccttccctctcttagatacagatgttgatttttcctgaaaaatgtaaccaggcttttcaggcttgcttgtattatatgaagaggtgctaataattagtacctagacaggtaaagaatcctgtaaattagaacggtcataatttaattagctgaagtataagaacacagaagtattgtaaggaagaacagaaagtggaggtagatctaataatagctaacattagtattcaaccctgggcacacattagaatcagtaaggtaaggaaagtttttaaaaagtctcccaacctagactcattaaatcagaatgttttaaaatctcccccaggtgattctagtatgggtctaggcttgagaaccaccgactagctgaatactcttcatagaaaataaaaggtttggaattgttgctgccattctgcctgcttttctttggaacagaaaacagcatcaactcaaattctggatctgacacattgatcttttcccctttccctaaggtgtcatttggccttgtgctctctagagaagagttaacaactctgttctctttgctcagaaaaggcagaataacccgaggaggtgtgcctcagttctgcctgggctccagctactccctcatttccatggactttgcacagtatgtcattgtgttgggacagaggagaattcatatattctttagagcactcagagtttctttctggagatcattactttttagatcaaaggatcttttatgtcttccttacaaacaccagtaaatgaaactgctcatttctgaacactaatgtgaaatctaagattagtttttaaatatctctgtatattaatatctaatatctactcgtgtcttaatggagcaagtaaccaattagatctgggtgggcttttgggcataattcccccttccacaattgtgtcacatagtaccatttgtgtacagcaaagtgcactgcaaccctttgaattcttgcaaagtgaacacaccttcagaccaccacctgtatccagaaataaaaaatgaacagagtcattgaaagagaaaaataaataaataaatacaagaaatagaaaatggacagcatcccagtagtcccaggctatgcttggccctccctttatattttcccttgcttttcttaccctttggttttgccaataaaagtttctcgagaggtttttgtttgttttttggtgttttttgttttgtttttgtttgcattgtcaatagttatttaaacacagagtttgctgcttgccaccttaaaagaaggggaaaactggttgtcctctctccgaatctcaatagacatctattctcttctctccctccctccttttctctgaggtgtagtattgccttcctgtcaggtcatttcagatcctttggggaaacccaagagggagctacagttggataatcagcctctttttttttttttttttttttttttgagatggagtttcactcttgtcgcccaggccggagtgcaatggcgcaatctcggctcactgcaatttctgcctcccgggttcaagtgattatcctgcctcagcctcccaagtagctgggattacagcgcccaccaccatgcccgactaatttttgtatttttagtagaaacagggtttcaccatgttggctaggccagtcttgaactcctgacctcaggtgatccacctgcctcagcctcccaaagtgctgggattacagatgtgagccactactcccaacctagcctcttctttaggttaaaaaccaaacaggaaacttcaccagaaaagaaatgctaagaatgatcaccactatactttaaaaaaaaaaaaaagaaagaaaaaaaaactacgttactgtatttttttttctctttcatactacctcattccaattagcaaggggagcctacagaaggaagacggaataaaatgactttaaaatttaactttgccactaattgccatataattttggataacttgtttttcataataaatagaggcaagaatttcaaaggattgagatagaagccaggttgcctggctttgcacctgggttctatactttcttgctgtgtgaccatgggcagtttctcagtctctctttagctaaaataggaaataagaaaaaactacctatcctcatggggttgttacaggatcacgtgagttaatatgtatgacatacttagaacaatgtatgccatatgataaaccctatttaagtgttaactactaatattattaatgataatggtcattactattattatttatccctgagctccttaaagggagggattatatttttaagtttatatatctggtatgtagccatgatacatagcaggtgcttaataattttttctttttattaatttatatatgtaagaggtataatctatattcagtaaaattcaccctttttaatgtacagttctacaaatttttttttttttttttttttttgagacggagtcttgtgccgttgcccaggctggagtacagtggtgcagtctgggctcgctgcaagctccacctcccgggttcacgccattctcctgcctcagcctcctgagtagctgggaccacaggcgcccgccaccacgcccggctaatttttgtatttttagtagagacggggtttcactgtgttagccaggatggtctcgatctcctgacctcatgatccgcccgcctcggcctcccaaagtgctgggattacaggcgtgagctgccgtgcccggcagttctgcaagttttggtaaaagaatatcatcatgtgtaaccaccactgcaggttatagaccagttccttcacctaccaaaatttacccatgcccatttttgtcagttcttctccccaacccctgtccttggcaactcctgatctgttttttaatctcattaattttgccttttccaggatgtcctataaacagaattatatagtatatggccttctcagtctgacttctttcccatcacataatgcgtttgagattcatttgtactattgcatgtgtcagtagttcgtttcttttcattgctttttattgctgagtagcattccatagcatggacatattatggtttgtttttgttttacccgttcaccatttgaaggatgtttagattgtttcaagtttttagcaattgcgaatgaaagtgctacaggttgcaaacagttacatacaggttttttatgaatgcttgttttcatttctcttggagaaatgcctagggataaggattgctgggtcatatggtaagtgtatatttacttttgtaagaaactgccaaactgtttccaaagtgcctgtatcatttcgcgctcccaacagcaatgtctaagagttccagtagctacacatccttaccagcaggtgttattgtcaggttgttgttgttttggccattctaataataatatctcattgtggttttaatttgcatttccctactctttccatatgtttatttatcatccatataccttctttggtgaaaacttgttcattcacaatcaaatgtgatgttagctctcggtatttttgtagacaccctttatcaagttaattctcttctatatctagtttgctaagattttataatgaaatcttagtttttataataaacagataacacattttgtcatagactttttctgtatcaattgagatgactgtatggttttttttcttcttcaggctgttgatgtgtttaattacattgattgattttaaaatgttaaatacactttgcattccaagtataaatgcatttggtcacgatgtagtatatttttcttttttttttttttagacagcgtttcactcttattgcccaggctggagtgcaatggcacgatctcggttcaccgcaacctccgcctcccgggttcaagcagttctccacctcagcctcccgagtagctaggatttcaggcatgcgccaccatatctggcttattttatatttttagtagagacagggtttctccatgttggtcaagctggtctctaactcctgacctcaagtgatctgccctcctctgcctcccaaagagctaggattacaggcgtgagctaccacacccagcctaaagtattatatttcttacatgctgctggattagatttgctgttaatttgttgaggatgtctatattccatggtggatattagtctgtagctctcttgtgatgtctttgggtttggtatcagggtaatgctggcctcatagaatgagttgggaagtgtttcctcatcttgagttttctggaggagtttgtataaaattggtaatatagccttcttaaatatttaaaagaattcaccagtgaagccatctgttctgggttttttttaacctacaatttctttaaataggattatctctttcttcttgaacaaactttggtaatttgtgtctttcaaggaattagtctgctttatctagttttcaaatgtattaacataagcctgttcataatatcccattattaggcttttttttttttttttttttttttttgagatggagtctcactctgtcacccaggctggagtgcagtggcacaatctcggttcactgcaacctttcccttctgggttcacgcaattcttctgcctcagccttctgagtagttgggactgcaggtgtgcgccaccacgcccagctaattttttgtatttttagtagagacggagtttcaccatgttggccaggctgatctcgaactcctcaaatggtccacccgcctcagcctcccaaagtgctgggattacaggcatgagccaccatgcccagcccattattatgcttttaaaatctgtagaatctgtagagatgttcctccactctctcattcctaatgttggtaatttgtgttttctttttcctgatcagtttgatttggtttatcgattttattgatattctcaaagaactagattttttgttttactgatatttctctataatttttctgtttcacatttcttatgttttaatttttgttttatgggttttttgggtttttttgtttgttttgtttgtttgtttttaagagacagggtcttgttctgttgcccaggctgatcttaaactcctggcctcaagcaatcctcctgccttggcctctcaaagtactgagattacaggtgtgagatatcacactcaactgcttttcttatttttatgattccctttcttcttgctttgggtttgttatgtacttctttttctagtttctttaaatggaagcttagattattgatttgagacctctaattctgtaatataagcatttagagttgtaaatttttttctaagtaatttcactaatatcgttggagaacacgctttgtatgacttgaatcctttaaacttatttagacttgatttttggtccagaatcttacctatcttggtaaaagttctgtgtgcatttaaaaaaaaaaattgctgttgggtatggtgccagttaactcaagttggttgatattgttgctcaagcctcctaccagttttctgtcttcttcttctgttgatgattgagaggctatgaatatggatttgtctgtttctccttgtagttctgtcagtttttgcttcatacatcttgaagctctgttaagtatgtaaacatttagaatgatgtagcctcttgatgaactgacccctttatcattatgactctctattcctataatattctttgttctgaaatatactttgtctgatattaacatagccattttaactttcttttgattaatgttagcatggtataccttttaaaaaatccttttacttttaacctatttgtctcatatttaaaatggatttcttataggcggcatataattaggtcttttttattcagtctgaattttttgtcttttcggtagtgttaaggcctttatatttaatgaaattattgatatggttaggtttaaaccttccaccttactattgttttctatttgtgccatctgttctttatttcctttttcctttttcttcattcttttggattatttgttatgatttgattttatctttatttattcttattctaccgtgtgtctctgtgtgtacatgtgtggcttgtttagagtttatagtgtgatatttaactcattactgtttaccttcaagtaatagtaatgtcatttcacatataagaaccttgcaaatatgtacttctccttctcctgtcctggcctttatgctgttgttgtcatatgttctgcttccatctatgttataacctccaaaatacattattgttatttttactttagttattttctaaagcagtgtttctcaacttcaataccattgacattttgagccagataattctttgttgttgcctcccaatacccattagaatattattgaatattctattaagaatcactgttctaaggtgatttttaaaataagaaaatgaggctgggcatggtggctcatgcctgtaatcccagcactttgagaggccgaggcgggcggatcgctcgagatcaggagtatgagaccaacctggccaagatggtgaaatgctgtctctacagaaaatacaaaaattagctgggcgtggtggcgggtgcctgtaatcccagctactcaggaggctgagggaggagaaccacttgaacccgggaggcagagattgcagtgaaccaagatcacaccactgcactccagcctgtgtgacagagtgagactccatctcaaaaaaaaatgaaacaaaaaatgaggaaatgtttctgttcactcacctggctgtcattatcgttgtgcttcattcttttgtacagttccggatttccatctagtgtcattttcttgtgcctcaaggatttccttttccatttctttagtgccatcctgctggtggtaaatgcttttatttgtgcatctggaaatgtctttatttccccttaacttttcagagctgtttgtactggcttagaaatctaggttgttttctagttgttttccgttggtacgttcaagacgttgctccactgtctcctaccaggtttccagggagaagcctgctgttgggcacgtcctggtttcccctgctctacctcccgcctttgttcctggtttctagcaatttgattttgatgtgtctcagttaagtcttcttcatgtttgtcttgcttgcagtatctgtagttttataattttcttcatattggaaatgttttcagccatcaactcctcaaaagtgttatctgtctcttctttcgaagactccaactccctatagtatagtaggctgtttgaagttatcccaccactcactaaggtcctggccttattttttttttttcccagtcttttttttttcctctctgtttcattttggacagtttctgggacacagttgcttggaaacagtttgattcttttgagtttggagtggagacagtctccaaactttccacatttgccgggaaccactatcctcctccagtgcactgactgtggactctggccaccttgtcctccttcagcccccagctccatctcctcaatgcacggagaccacagcctccacctgggtcttcctccctgtgctgcagcctggacacttccccaggaggaagctgggcgggaagcaggctctctccaggattactgacctgtgctcttattgtccagttggggtttgtttgtttgtttttcctgccttttaaaaaggtcatttgaaggctggacatagtggctcacacctgtaatcccagcactttgggaggctgaggctggcagattgcttaagctcaggagttcgagaccagcctggccaacatggtgaaatcccatctctactaaaaatacaaaattagctgggcatggtggcatactcctgtagtcctagctactcaggaggctgaggtgggagaatcgcttgagccctagaagtggagactgcagtgagccgagatcacactactgcactgcagcctaggtgatagagggagaccctgtctcaaaaaaaaataaaaataaaaataattttttaaaagtcatttgaggctttttctgtatttgtacatgcttttcatataggtttcgtctatttttcccagtgttttagttttctattttggctggatgtggagattgtggttaataactgcttattgaatgtatgtgtagatatggattcataatcttctcttatttcccatgcctctttttccccttctgtcactgacatttaaaaataaactcatcagaagagaagcatgtaggaaggcatgtgtgaagcataatttgtgctcatccttctctgcttatcaaaattggctgttggaaattagctggagtcagtttacctgcccttaatctgtctggagtcatgaagaaagagacaaaactgagttaggaaaatcttgaaataagcactgggctgggcctggagcaggaggatgagtggactcagcacagaagtgtggttgccttgcaggttgtgtgtcgcagccctgtcggtgaataacttctgtgacaaccgcgaagccctgtatggtgtgtttgacggagaccggaatgtggaggtgccctaccttctccagtgcactatgagtgacattttggctgaagagctgcaaaaaacaaaaaacgaagaagaatacatggtcaatacattcattgtcatgcaaaggtaaaactcagagttcctgcttacctgctgtgtgttttcttgctctttgagtgtttatcctctgtttagaaaagcaggtgcccaatggtctccaagccatgttttttgactatgagtaccaagatgcattcaggcaagtttggtgttgcccaggcatcaggaatggtgctccggtttgagacatactgatgttcagacaactttgtagaaggctcagacaatgacaaggaattagtttctctgagaactggacctcactggcctgtgttgattgcagattttcatcagattgtttgcaatgccatttctcctcccaaatcatgtgagctgtaggggctttttagactttctgttgtggggacctctctttgaaatggaccgtttctatcctagtttcttggcccttatgaaatactatcactggtttgagatagtgcaaacctttgtgaaatcaagatggtcagattttagcccaagagttaaatcattctttatattttgttttctcctttattaaatgttcaagacagtgttactggcagaatcctaggccatagcctggagttgccaccagcagcagagctttaggttgctgtagaaattgtggaatattgtttgtaactcttagaggaatgaggattccttcattcagagaattgtttattcttaccaccttcatggctttctaggtaataatggaattgcctgtctataagtattgtgctgcagactcactcatgtgggacccaggagtgatgaatgtactggtatttgaggtcatgagagcagtcatggtgttttatccttatctgctctttctctcccttgatattctgccagagcaagtagctttgttagaggggtagaagtggtgtctggggaggagtgttcagagcagcctttacagtgatacctgcatcacaaatggttcctctcagagagcttggtggaggcaagcctggggtggttcttgctgctacactcacccctgactttcagattctcagtgagcatatacaattagcaactgaacaataatggctaatatccagcaagcccttaatatgtaccagtcattgttctaaattaccttatgtgtcataaattgttaccagttagctgggtaatgttactgaaagtgatgtacagtgaggtgaagcacagtgcctacgggctaataggtagtgcagccaggacctgacctcaggttgtgagactcccttcaaaggatgttgtaactagcaggcacatcagctttcctgtttttaccacccttttgttctagaaaaacagcaagcatgtatcatatgcacacacatacacatgtgcatacagaccacagcacaaacacatcccttcacaacccccaaaaggtctgctttttatgcaccctcaagcactgggtaagaattaaaaactgagaaccccagtctcggattacttgctatactttttacaaatcactgtgcctgtgaaagggagaaagtagagatgccttggaagggtctagagccaaatatctgaaagttggagtttaggaacctaaactataggcccttctccagggtcttttgtatgtctcttattttccctatctgttaagagggtacgggttgtgtggtgagcttttggtccttaggggaactggtctttgtgcgggatttcctaatgcatgcaagtaggcagccctggtttccattgctcttcttgccagttgcttaccttacacacgtgataggagcagacagtacctgagggtctgcccttgtaaaacgggaggctgtttttcttaactttcttgctcctgtaccactcaggaacagcaggggcctgggcagtgttaccatttgtggggcttgccatagttgttcatgaggccatgggagcaataatggtcttttgtccctctctgccatttctctcccttgataatctgccagaacaagtagctttgtaagaggggtttttgatttttgattttcagaatttgcaggtgctttctgtatttggtaggtctgtggattctcatgattaaaaagataaatcacaagcacttggtatttgattactagaatgtcctttctatgagttttctagaatagatggtgctggtccagaaagtctttactatatagggcaggaacatgaacactccaatacttcaaggctgctaccagcaaacacccttataagggggagagggttgtcaggtttttctaaagtgtgcctgtcagtggggtagggtgtttatacctgctcttacatacatggttttttcaatgttcctttcctggggacagaggggatttagagaagcagatggagaaagaagtcattttcctgctgtctttggagtgtgctgatagggcagtgtggttgatgagggtagcaggctgtacacagcagcccaggggcacccgccttccagagcagcacctgtggcttttaatggtacagtgatactgtcttccagttgtgagcctctctgtgtggatgtgtgtgatgtcagattcaggggctcttttcatcaaagaggcagagcagtgtgtgctttgatgaaggaggcggagtggaatccccagctgtctccttcctggccctgtccagtggtgcggtcttgctgttgaatttgcagaactggcactgatgggctgtgtttgagtgtcaccccctctcttcggattccaggaaacttggaactgctgggcagaagcttggtggtgccgctgtcctttgtcatatcaagcatgaccctgtggatccaggaggatccttcaccttgacctctgctaatgtgggcaagtgccaaacagttctctgtcgaaatggaaagccgctgcctctgtccagatcttacatcatgagctgtgaagaagagctgaagaggattaaacagcacaaggccattatcactgaggtgagaaaacaggggtgttgcccaggatggtggagaggagaggagaggagaccaggtcatagcagaaactagctagggagcatttgccttcaaagaacacttttgaagttggtttgacattagaattccaaatccatagtatcacaaagcagatgtcttacattatgatgtatatgcttgttggttgcctctctgcatcaggcactgtgctgcgtgcttcatgggcatgatcccattccatgtttgcagccactctgcagagggctgctttggtggttgagggctctacccctgacatcacactgctagttttcatatcttagctctgccacttgtaggttgtgacctttaaacctctctaagcctcagttttctcatctgtaaagtgggaataatcatgcatctgtcctatcttacaaggttggtatgacttgtaaactatgaacgtctatgtaagtgtactagttgttattttggttcatacctcatgtcccatttgagtacacagtaagcagttttcaactgggggcagtttgcttccccacaagacatttggcaacatatggagacatttttggtcatcacagctggggcggagagtgcaattgacatgcagtggattgaggccactgagcatcctacagcgctgctaggacaatgctgctcaacaccccacaatgcacagggcagtctccacaacacagactgtggtgtgtgtgtttggagggcgtgtctcaaggaagagaagtaaaatacaatacaaaacaaaacctcgttgttgagtattaagcaatgcaaacaaaagcagggaagaggcgaggcacagaaaacaagagaagtctgacgtgcaaaccatgattcatgtaggtcacagaaatcatttaccttcaattgtgtttggcataatgttgaactaaagttgaaatcagtgcattctgtacacattagactgtcttctgctccctagcacagtgtctaccatccatgtgcatcctctctgctccaagaatagacagagaacaaattcacacagactcatttgcacagaatcccatgtatagcttgagtctttctgtttctttcttaaggccctcatcaaagcctgtgtggagtcagtcttttttctctactggactataagctttcaccagagtccaccccaaactgtacatggttctatgggttttatcaacaatgtaagactggaaacctcttgaaggtagatgtttctttgcaggtcactgctgtctgcccacgtcattttttcaggcacagggcagatgactgacactttgatgaattagcgaatggagcagaactcctggagcccatggtggaagcttcattgctcatgaatcacaaaaccattggttttgatagagagaaatctaaagggatggacagaacagcaagaacagtttctgccaaattccatgctttggggacagattatgtcagtagaatcaaggcagtttaaggttgtgcttgaagcccatcttactaattttactaataggaatgcttacctgcttataagtgtggtgtggcaaagttgtgtgagaagctgggaaagacatccctaggacaagtaaacaccttgccaaatcccaaataaagggaagtggtaggactggaaaggaaatggatattctgtggaagaaacactttgtcatcccagacagggatttgtcataatgaagcctttcctggaaagaagtgttaaaactagggcatgtagaggtatgtcatggacctgagaatctcaaaatttgaagaataaagaaccaagcaggtacacgtggcaaaaaaaaaaaaaaaaaaaaaaaacccaggtctttttattggcaagtggtctggcactttggtaattgatttaaatagcatgcacacagctgaactaaagccagcagatcttgccttctccattggtcaacaggaaatcaagttcaaggaagttgtaagaattggcatttcttctttagcatctgttctcctgacatgagcattcttacccacctagtcaaaccaaggttttctccaccgcttaagtactttcaagtcctctctggacctttagacactactgcctcttgtgatcatggagagcaatggaagatttaggagcattgtcttgatatatgcctgcgtcatgtgtctttgctcaggactggcttctatcagaaagtctcttgctacctcagagtcttcctacacccagcccgtctgagggccgatccttgatcaccatgttcaccaagggagggaagatgtaaacccatgtttacaggaggagctagccagctatgcttgctgtgtaaggctagatgatggcttgctttagataaacagcaggacttgtgacctagtgtgaatggggtcccagtaacacacataaccgaaatcttttccttttgtccctactgctccttacctgcccaggcctactacctggggtttctgatgacaggtgcacattaactactcactacagagtgagcccttctttcctctgtgggccacacagcacttctctgtggtcctacagtcgagacagtcgagggacccgcagggaacctgcacagttgccgcaggtgctctgtattaactgtctgtctgcaaacccttgttcttccaggatggcaaggtgaacggagtgactgagtccacgcgcatcctgggctacaccttcctccatcccagtgtggtgcctcgcccccacgtgcagtccgtgctcctgactccccaggatgagttcttcatcctaggcagtaaggggttgtgggacagcctgtccgtcgaggaggccgtggaagccgtgcgcaacgtgcccgatgccctggctgctgccaagaagctgtgtaccctggcccagagctacggctgccacgacagcatcagcgctgtggtggtgcagctcagtgtcactgaggacagcttctgctgctgcgagctcagcgccggtggggctgtgccaccacccagtcctggcatctttcctccctcagtgaacatggtgatcaaggatcggccctcagatgggctgggcgtgccgtcctccagcagcggcatggcttccgagattagcagtgagctctccacttctgagatgagcagcgaggtggggtcaacagcctccgatgagcccccgcccggagccctaagcgagaacagccctgcctaccccagtgagcagcgctgcatgctccaccccatctgtctgtccaactccttccagcgccagctatccagcgccacgttctctagcgccttctccgacaacggccttgacagtgacgatgaggagcccatcgagggcgtcttcaccaacggcagccgggtggaggtggaggtggacatccactgcagccgggccaaggagaaggagaaacagcagcacctgcttcaggtgccagcagaggccagtgatgagggcattgtcatcagcgccaacgaggatgagccaggtctgcccaggaaggcagacttctctgccgttgggaccattgggcgccggagggccaatggctctgttgcgccccaggaaaggagccacaatgtgatagaggtggctacagacgcacctcttcgaaagcctggaggctattttgctgccccggctcagccggatcctgatgatcagtttatcatacccccggagctggaagaggaggtcaaagaaatcatgaagcatcaccaggagcaacagcagcagcagcagccgccaccaccccctcagctccagccgcagctgccgcggcactaccagctggaccagctgccagattattacgacacgccactatgacccagccgagctgtttaacaaataaactaaccacaaaagactgagttgcaagagtctcccaggctcacattaaaccaggggttttactccacatccttcccccagacactgttcccaacctgtcatcgcagctaatctgtaggttctctttctttgggttatttttttaagtaatcaccactttcttctagtgatgctttaccaatatgatttacatttgttaacttctccccctaacatatcagatatgtaaagacaaagaacaaaaggtttaatatattacagagaaacagttaatgataatgtaatattttttaaaatggctttttgttgtttgtttggaaggcagggcaggctgccgttgctaaatgatttaataatattgtaattctgtatttctttggggggaaaaggcttttgttttgttttgttttgttttgttttgtttttgtcttgaaaataatagacatttgtagaatatggagactaactcctaggagttgctttactctgtcaggtgacttaagtcactgggattcactaattttctctgagagaacagctgattgagaatttccattgtaaatagctcagtgttgtatagtgaggcttacgatgttttgtagtcttggcgtaaggacacagcccaagtaactgacgtttcccctccccctcccctctgaggagcctgcctgcctcacaactcaccctcacttcactgaatgaggaggctgagcagctgcagtgtttctgtccggaggaaatggatcttaggccactggacaagaacctgcacccaagggccctgaacccattttcctcccctgtcccagccttcccactttgacagacacttttaactgtgttccttactgctgccacaatcagcatggttgtatagtgccccattaggccatttacatacccagagttatactcaagcagaatgcacaaatggacatgtcataatttttgttaca

SEQ ID NO: 184 - DNA, 4536 bp, Homo Sapiens
ataacatgtttgcttctgtttatttcaggaaaacctcacagcacgggtagctctgaacggattcagctctcaggaatgtataatgtccgtaaaggcaagatgcagttgccagtgaaccgatggacaagacgccaagtcatcctatgtgggacctgcctgatagtatcatctgtgaaagacagcttgaccggaaagatgcatgttctgccactaattggtggaaaagtagaagaagtgaaaaagcaccaacactgtttagcatttagctcctctggaccccaaagccagacttactacatttgctttgatactttcacagaatacttaaggtggctgcgacaagtctccaaggttgcatcccagcgcattagctcagtggacctctcgtgttgtagcctggaacatctgcctgccaacctcttctacagccaagacctcactcatctcaatttaaaacaaaacttcctaaggcagaaccctagccttccagctgccagggggcttaatgaactgcaaaggttcaccaagttgaagagtcttaacctttccaataatcatttaggggacttcccactggcagtctgcagtattccaaccctggcagagctgaacgtgtcctgcaatgccctgcgatcagtcccggcagccgttggagtgatgcacaacttacagacatttttgttggatggaaactttctccaatcccttcctgctgagttggagaacatgaagcagcttagttatctgggtctttctttcaatgaatttactgacattcccgaagtattggagaaattgactgctgtggataaactttgtatgtctggaaactgtgtggagacccttaggctacaggctttaagaaaaatgcctcacattaaacatgtggatctaaggttgaacgtaattaggaagctgatagcagatgaagtggactttctacagcatgttactcagcttgacctacgagacaataagcttggtgatctagatgctatgattttcaacaacattgaagttttacactgtgaaaggaatcaactggtcacattagacatctgtggctatttcctaaaagcgctctatgcctcttctaatgaacttgttcaacttgatgtttacccagttccaaattatctgtcctacatggatgtttcaaggaaccgcttagaaaatgtgcctgagtgggtatgtgaaagccgaaagctagaagttttggatattggccataatcaaatatgtgaacttcctgcccgcttattttgtaatagcagtctccggaaactactggcaggacacaaccagttggcaaggctgcctgaaaggctagaaagaacctcggtggaggtcttggatgtgcaacacaaccagctccttgagctcccacctaaccttctgatgaaggctgacagcctgagattcctgaacgcctctgcgaacaaactggaaagccttcctccagccacgctttccgaagagacaaacagtatcttacaagagttgtatttgacaaataacagcctcacagacaaatgtgtgcccttgttaacgggacacccccatttgaagatccttcacatggcctataaccgacttcagagttttccagcaagtaaaatggcgaaactggaggaacttgaagaaattgatctcagtgggaataagctgaaagccatcccaacaacgatcatgaattgcaggcgcatgcacaccgtgattgctcactccaactgcatcgaggtctttcccgaagttatgcagctcccagagatcaagtgtgtggacctgagctgtaatgagctaagtgaagtcacattaccagaaaacctgcctcccaaactgcaggagctagacctgactggaaacccgcgccttgtccttgatcacaaaaccctggaactactgaataatatccgctgtttcaagattgatcagccttctacaggagacgcttccggagccccagctgtatggagtcatggttacactgaagcttcgggggtaaaaaacaagttgtgtgtcgcagccctgtcggtgaataacttctgtgacaaccgcgaagccctgtatggtgtgtttgacggagaccggaatgtggaggtgccctaccttctccagtgcactatgagtgacattttggctgaagagctgcaaaaaacaaaaaacgaagaagaatacatggtcaatacattcattgtcatgcaaaggaaacttggaactgctgggcagaagcttggtggtgccgctgtcctttgtcatatcaagcatgaccctgtggatccaggaggatccttcaccttgacctctgctaatgtgggcaagtgccaaacagttctctgtcgaaatggaaagccgctgcctctgtccagatcttacatcatgagctgtgaagaagagctgaagaggattaaacagcacaaggccattatcactgaggatggcaaggtgaacggagtgactgagtccacgcgcatcctgggctacaccttcctccatcccagtgtggtgcctcgcccccacgtgcagtccgtgctcctgactccccaggatgagttcttcatcctaggcagtaaggggttgtgggacagcctgtccgtcgaggaggccgtggaagccgtgcgcaacgtgcccgatgccctggctgctgccaagaagctgtgtaccctggcccagagctacggctgccacgacagcatcagcgctgtggtggtgcagctcagtgtcactgaggacagcttctgctgctgcgagctcagcgccggtggggctgtgccaccacccagtcctggcatctttcctccctcagtgaacatggtgatcaaggatcggccctcagatgggctgggcgtgccgtcctccagcagcggcatggcttccgagattagcagtgagctctccacttctgagatgagcagcgaggtggggtcaacagcctccgatgagcccccgcccggagccctaagcgagaacagccctgcctaccccagtgagcagcgctgcatgctccaccccatctgtctgtccaactccttccagcgccagctatccagcgccacgttctctagcgccttctccgacaacggccttgacagtgacgatgaggagcccatcgagggcgtcttcaccaacggcagccgggtggaggtggaggtggacatccactgcagccgggccaaggagaaggagaaacagcagcacctgcttcaggtgccagcagaggccagtgatgagggcattgtcatcagcgccaacgaggatgagccaggtctgcccaggaaggcagacttctctgccgttgggaccattgggcgccggagggccaatggctctgttgcgccccaggaaaggagccacaatgtgatagaggtggctacagacgcacctcttcgaaagcctggaggctattttgctgccccggctcagccggatcctgatgatcagtttatcatacccccggagctggaagaggaggtcaaagaaatcatgaagcatcaccaggagcaacagcagcagcagcagccgccaccaccccctcagctccagccgcagctgccgcggcactaccagctggaccagctgccagattattacgacacgccactatgacccagccgagctgtttaacaaataaactaaccacaaaagactgagttgcaagagtctcccaggctcacattaaaccaggggttttactccacatccttcccccagacactgttcccaacctgtcatcgcagctaatctgtaggttctctttctttgggttatttttttaagtaatcaccactttcttctagtgatgctttaccaatatgatttacatttgttaacttctccccctaacatatcagatatgtaaagacaaagaacaaaaggtttaatatattacagagaaacagttaatgataatgtaatattttttaaaatggctttttgttgtttgtttggaaggcagggcaggctgccgttgctaaatgatttaataatattgtaattctgtatttctttggggggaaaaggcttttgttttgttttgttttgttttgttttgtttttgtcttgaaaataatagacatttgtagaatatggagactaactcctaggagttgctttactctgtcaggtgacttaagtcactgggattcactaattttctctgagagaacagctgattgagaatttccattgtaaatagctcagtgttgtatagtgaggcttacgatgttttgtagtcttggcgtaaggacacagcccaagtaactgacgtttcccctccccctcccctctgaggagcctgcctgcctcacaactcaccctcacttcactgaatgaggaggctgagcagctgcagtgtttctgtccggaggaaatggatcttaggccactggacaagaacctgcacccaagggccctgaacccattttcctcccctgtcccagccttcccactttgacagacacttttaactgtgttcctcatacccagagttatactcaagcagaatgcacaaatggacatgtcataatttttgttaca

SEQ ID NO: 185 - protein, 1176 aa, Homo Sapiens
MYNVRKGKMQLPVNRWTRRQVILCGTCLIVSSVKDSLTGKMHVLPLIGGKVEEVKKHQHCLAFSSSGPQSQTYYICFDTFTEYLRWLRQVSKVASQRISSVDLSCCSLEHLPANLFYSQDLTHLNLKQNFLRQNPSLPAARGLNELQRFTKLKSLNLSNNHLGDFPLAVCSIPTLAELNVSCNALRSVPAAVGVMHNLQTFLLDGNFLQSLPAELENMKQLSYLGLSFNEFTDIPEVLEKLTAVDKLCMSGNCVETLRLQALRKMPHIKHVDLRLNVIRKLIADEVDFLQHVTQLDLRDNKLGDLDAMIFNNIEVLHCERNQLVTLDICGYFLKALYASSNELVQLDVYPVPNYLSYMDVSRNRLENVPEWVCESRKLEVLDIGHNQICELPARLFCNSSLRKLLAGHNQLARLPERLERTSVEVLDVQHNQLLELPPNLLMKADSLRFLNASANKLESLPPATLSEETNSILQELYLTNNSLTDKCVPLLTGHPHLKILHMAYNRLQSFPASKMAKLEELEEIDLSGNKLKAIPTTIMNCRRMHTVIAHSNCIEVFPEVMQLPEIKCVDLSCNELSEVTLPENLPPKLQELDLTGNPRLVLDHKTLELLNNIRCFKIDQPSTGDASGAPAVWSHGYTEASGVKNKLCVAALSVNNFCDNREALYGVFDGDRNVEVPYLLQCTMSDILAEELQKTKNEEEYMVNTFIVMQRKLGTAGQKLGGAAVLCHIKHDPVDPGGSFTLTSANVGKCQTVLCRNGKPLPLSRSYIMSCEEELKRIKQHKAIITEDGKVNGVTESTRILGYTFLHPSVVPRPHVQSVLLTPQDEFFILGSKGLWDSLSVEEAVEAVRNVPDALAAAKKLCTLAQSYGCHDSISAVVVQLSVTEDSFCCCELSAGGAVPPPSPGIFPPSVNMVIKDRPSDGLGVPSSSSGMASEISSELSTSEMSSEVGSTASDEPPPGALSENSPAYPSEQRCMLHPICLSNSFQRQLSSATFSSAFSDNGLDSDDEEPIEGVFTNGSRVEVEVDIHCSRAKEKEKQQHLLQVPAEASDEGIVISANEDEPGLPRKADFSAVGTIGRRRANGSVAPQERSHNVIEVATDAPLRKPGGYFAAPAQPDPDDQFIIPPELEEEVKEIMKHHQEQQQQQQPPPPPQLQPQLPRHYQLDQLPDYYDTPL

SEQ ID NO: 186 - DNA, 34416 bp, Mus Musculus
gggcggacagcgggaacgcgctccggggggtggggacgcgcgagctcaccactcctcaatgacaaatcgactggggacagctggggtccggccccaggacggggcggggcgctcgtgagagcggcgattctggttgtgcgcatagccagagcggcggtgggacggctcccccaggtaaggatgctgtgccccgcaggggaccgcagacgaggggtgcgccctaggatagggaagtgagtacgctctccgcgcgatcgcaggcctcctagttccacgttgggagggagggacacgtctcatgaaggacaacgccccggactgcgccccgcttggcttgaaaggtgtcttttgggaaagccggagagactcccagccggatctgggggtgctgaggacatgggggaggcgccccagtttctcttcccttgctgcctgtccttccctttttccacaaatggccacttcctgccttttcgggcctccctcctgagttggtccacttcctccgtccctttcagatccataaaatgttgcccaaacttctttcttaaaggtaggaacttgtactttgggtgacctgggagctgggttcaagaagtttgtagggatttgttggttgtgaattactttttgattctgtcttccagttgcctttcagagtgtgactagcatcaaaggtggtttttagaagcaccgtggcttgaagggttttcctgacccggttctctgagccaagtcagctcgtggctcagacttgcttgtggcccagacttgagtgtccccagagggcgcggcacccacagcagggtcctttttcctagagttcatttccaagtgaatcctggaatctagggattggtgttaccagggtgttctggaagagggtctggaatggactgatagttcttaccctcacttgccttcaatccctgaagaacagagatcctctcgctctggctctgctttcatttcctaaccacctttcttaagtttgggtttattgaatgatcaaggcttatcctcagaggggcagggagtgtgctttggatgtgccaagtgaagatagttttaatcagagcaagaatcttacatgttaagtctcagaacatgtcaaagtggcgccgcttaagcctggattgaggtggtgaaattgtgagagccataaagggaggtgctgaatattgagaaggaggtgtgagccaaggttgatcctggttttggaactttgtgtgtatgagacatgatcttttgtagcgcaggctggcctggaacttgatagatagctagagtgaccttgaacatgtgacgttcctgcctctaccccttgagtgttgtgataactgtattctaccatgcctggtccatgcagtggtggggctggaactctgggcttcctatatgcccaagaactctaccagcagagccaaatccccagcctggttctggaattttcttagtgccgtggtctagaggaggccctttgtcttctctgagctctgaaagagttggctgcccacccccactgtcagcttccaatccagtaggcagtgtttaaggtgtgggagtgggcatggttctaggattccatgaaatgcccccctgctgaagctgtgatgtgtgtgtgtgtgtgcatgagtgtatgagtatatatgtgtatgtgtatgcattcttgtaattttatttacatgtgactatgcaaatatctgtatatatgtttgtattttttagatttatttttatgtgtgcatatgtgtgggacaggaacccttggaagccagaagagggcgtggctgggattccctggagctggagttacaaactgttgtgagctgccctgcatgggccctgggaaccaagcaggcctctggaggagtagcagatgctcctaattgctgagccgtctccccagcccccaccaggttacttatggtgtgtgtgtgtgtgtgtgtgtgtgtgtgtgtgtgtgtgtgtgtgtgtgtgcgcgcgtgcgcgcgcgcacgcacgcatgctatgcacacatgtggcagacagaggatgctttgtagagtttttcttttccttcctcttttaattttcagaaccaaactggttgtcaggcttgtgtggcaagcccctctctccactaagcactctcttggcgtgggagcttttctctttctttttaagtggggtcttaagtctgtcccactcacaggaaactaacgttaggggaaaccagctgcggtgtgggccctgtaggtgctctgttgattctgacctcctcagagtctttttattttatttttttaagatttatttatttatttcatgtatatgaacatattatagctgtcttcagacacatcagaagagggcatcggatcccattacagatggttatgagccaccatgtggttgctgggaattgaactcaggacctctggaagagcaatcagtgctcttaaccactgagccatctctctagccccctcctcagaatttttatttttgtgcgcaatgtgtatgtacacaccacacacacacacacacacacacacacacacaaacacactacaatgttctaggagttggacagtgccttgtgcacgactaagcagcccccatccccagggttgctccccagctcctccccttcctttccagttacttcccactggaaacagcacggctgctcttatctgagatcccagcgaggttttactgtgcccgaggagatgttgttccaggaaagtgtgggtgtgagttactagatagcttttggaaaataggacctagacacgtaaagatagaaacatgagaattggaaccttaaatggagtctggagagtttctcgtgaatgtttaatggtggaggaattagaggtgtactcggggctggttcttgatgttttgtctgtttggttgctttggtgctggggatggagattttttaattcttaggccacggagatggctctgtgcttaaagcagttgccttacaagtgtaaggaaggactggagcttggatccccagagcccaaataaatgcctggtgggatggcagcctgtctgtaactccagcacacaaaggtggagacgggatctctggagaaagtgggctagctctcgagtcttgccataccagtgagccacgggttttcttaaggatgattcttgacatcagcttcagcctcaccgtgcatgtgcacacgtgtgcagagcacccacggcacaaacagatgtgcatgcacgcctgtgtcgactcagacacaaagagtggaagagaaatatcgtcactgttgccttgaagttcttaggaacttgaaggccttgggaacaatgacttaaggctccataacaagtttgaaccccgggagtttgtgctgtgttgttccatcatggcaaacctctctggagtctgtgaccaaacttccccattcatctcatttctgaacgtgggaaccattggagaccttgtctgaagctgcagttggaaacgtaataacaagcagagctattccattggaactttgtgaactgggaaggtctccagtaagacaaaataaacacaagaacccatgccctatatttctcactagcacaggagtcccttgtgtgtgtgtgtgtgtgagagagagagagagagagagagagagagaattatgtgttgacaattacttctaatctactgctgttagatgggcaagaaattttctttttttgaaatttaattctacatgtatttttatgtgtatgtatgtgcctgtgtctgtttatgtgtcccatgtgtgcaggagtcagaagaggtcagaacccttgcttgaggttccctccagttcccttgaggtgagagaggtggatttgagtcactgtatgggtgctgggaaccgaacccaagtcctctggaagagcaaccagctctcttaccactaatccattgctccctgcactcctgtgagcttctggtcctccttcctctacgcactcagtgctgggataacaagcgcacacctctatacgtggtttaggcagtgctgaggattgaaccgggacttcatgcgtgctagcctcacattccacaactgagtcacatccagactgccacaggccttctccaagactagcttccaacttttttttttcttttaaaaggttttctgtttgtgtgtttttgttttgagaaaggtctctcatgtagccctggctatcctgggaactcactatgtagaccaggctgacctctgagttacagagatccacctgcctctgccttttaagcataggattaacggcgtataccaccttacctagcttctttataagcactctttagactagacactattgaggtggtttttgttggggtgccttccaaagcatgtgggtactgtagaggataaagacacatcttgggttcctgctgttctagaaacttccatggtatacttgaaatttcatgttctttcttctggttctttgtcgttagacactagaattaatcagccaaatatgcagtcgctttagaaattagaaatttaaatcttactgttccccaaaccaaatagaacacagagattcttttagatcaactctaaaacaagttggtgggcaaaaaaaaaaaaaatgttgataaagtgatctttgatctccatggtgagcagctgaaaatgattatcagttcgtgtgtgtggagattgtatgcacacatgtgtggagctcagaggacaacatggactctctctctccaaccatgtggttcccagagatagaacctgggctgccaggcttggcggtttcaccttcctctgctgagccgtctcacctgttcttccgcctaattactttttaaattttaattctattttattttattttatagtctacggaggcttttctgtttgagctttgcacctctagagaaaggaccccaggggtctccctcctgtgtgttttggtctcgcttctttgtggtccctgatgctagctggggttgtcagcacaaggaaaccaaactgacagcgtggacacagattgttctgccatttctctaggtgtttgagttgcagatcaaacctagggctgatcgcgctacacttgctcaacctgcccgtgagggttcacattgattttcccagctctgtgatcatcagtgatgcaaactcaccatgtgaccgtgcttcatcatcacagttaggaaccgaacgatggctttgacacatggcctgatgaggacccggcgtttgcctctcttctcagcatttttggtgctcttgagagcacctgccaggacattcatggtgatgaggagtctttaattttatttttgagacagggtctcactgtgtaatccccaatctgaggtagtgcaaacagaggcatcattatatagagcaggctggcctgccgctctcagaggtcctcctgcctccgcctctcagatactggattaaagatgttaaacgctatgcccggccaccttccgatttgagatgtggtctccaattgaagctgaggcttgcccattctgttagacaggctggccagtgagtcccaaggattgtcctgtctctgcctcttctgttgggattatagagagatcactacactgtttccatgggtcctggggatctgaagccagagcttcacaccgcacggcctgtgctttatccactgtagtatcttcccagcccccttcttctggtcttacctcacacaggctccgcctctctctactgcatgactacaaagtcagtctgctacttctgttctttgagactgggtgtcatgtagctaagactgtccttgaactctgtgtgtagttgaagacagccttcaatccctgattctcttgtatccccgtcccacgggtgcgattacagaggtgtacgtaccaaaccagctttgtgtggttcggggaacaaaacccaaggctttaagcacacgaggcaagcactcagctagcttgaccatatttgcagccctgtctgcagagtcttgactggaccttgcttccttttgcttcaggacttccttcctccctgcagagagaggcagtaggtaggaagtgctgagcatagcagctgagagaggcagggccactgggcaaaggtttatgggcctgttcagaaaaggggctagatggtatcagtggtaagccattgggctgctacatttactgatgtagaaagttcacatggactggggagatggctcaattggtgaggtcttggaatgcaagcacaagtgcccaggcttgttcccccggacccatgctaacacaaagcaaaacagaactgtggcagcttgagtttgtaatctcagtgctggagaggtgcacacaggcgcttcccctggggcttgctcagccgatctagcctgagcagtgaactccaggccagtgggagaccctgtgcctgcctagagtgcctgaagccctgggctccgtccacagcatcacagaaaatcagttatgaagatgcatactcataaccccaaatctgaggtagagccaaaaggagcatcaggagctgacagttgtccttagctgtagagagagttcaagggtagcctgggctccatgataccctgtctcaggaaaaaatataaaaggcagaatataattgaggaatataacttatgttgacctctggcctccatgtgtacacacacacacacacacacacacacacacacacacacacacacatacaaacagagtgaacagtggcttgaagtggctgaggtgccacaaggggtctggcagctgtggctggttgttctaacctggttgtggcagagaaaatggaagatgggtagagggaaaaggtccattagagataagagccaggagaaagagtgagtagagctggggagaaacaaggggatctgggatgatcacctggtctggcttgactagtgatgtctgcactcctaggggcttgtgttgctattgtgggggtggggcaggtagattaggagtgcgttcattctgatttctttccattgttgtgataaaacacctagaccacagtagcttggggaagaaagggtttgtttagctttgagggaagcaagggcagggactctagaatgaactggaaggctggctggcttgccattctgtctttaagcaaagaatgcactcactgacaaggaagtacagcagaaaccgtggagcacactgcttggtgatcacccagggccaactgcactgggaatggagccgtccacagtgggctgggtcctcctacatcaaataacaatgcagacagtcctctacagacttgtccgcaggccaaagccctcaatggagactcccttcggagctgtgttaaattggtagttaaagctaactaggatactacttatgtatttgcttgtctgtttgacttgtgtgtgtttgtgagtacacacttgcacactcacaggacagctttcacaagtaggagctgtccttcctccatgcgcttcccaggatgtcaggcttggcaacaaggatcagactttagggtagagggacgaagagtggagagatctatttggggactgttgaatttgaaatccctgcaagacagccagtggggtgaggaagacagaggggcctggcctctgtcctccagtttgaggagacacaggaagccacttggatagatgtgctcagcccagggagactgtggaggagtgagaaacgtgacagcctgagcctcagccgggagaaaaccttagagaagagataggccctggggaacatgagctctgcagtctagaaggatgggcattgtcaagtgggagcagcagggcagcggagcctcggaggggagcgattgatgatcctggttcgtggttttaaatgccacatgagactggttatgtgattttcctttctcttgaattccttctccagccagaatgctagtacaggtagttggggtgaggggtagagttggtctttgcaggaggaactggcaagatgtcatctaagcgggagtgtcagaggagatcagaaaaaatgtgctgagatcggtgcttaataggtgtttgagcgagtgattggaacaattacaggtttgaggctgtggtgtctgaatattgtgcccccccccatagctgtatttgaacaactgttcctggttggtggtgctgtttggggaggtctaaggggtacagtcttgttggaggaagtatgtcactggaggagagctttgcaacccgtttgagttaccaaacacttacctatttacagtttgctctcttagctttgtgcttgtagttcaagctgtgagctttcagtcgctgctgccgtcaccatgcctacgattgctgccatgcataacccccgccacggactctaacccctggcaccatgaccctggataaactcttccataagttgccttaatgccacagatggacagaccagaggcatcatatcaggacccttgggtgagatcaggtccccatggcagagcgaaggtccctttttacacatttagaggaaggaggtggttctataccatgtgattggtagttatagtgcatgcttgctgccaggccgtctctgattcctgttaacctggggtcttatatacagagtcagctgtaagggtgcaggaagcgccgggcatggtggtgcacgcctttaatcccagcactcaagaggcagaggcaggcggatttctgagttcgaggccagcctggtctacagagtgagttccaggatagccagggctatacagagaaaccctgtctcgaaacaaaacaaaacaaaacaaacaaacaaacaaaacaaaacaaaacaaaaaagaatccaaggaagcaggttaatgggagagctttacaaaatgcgctggccctggctaacatgagctcaaaggatagaggtagggtggagaaccaggatcaggcgaggttcatggtatggtgggcctgaaacttagtgctctaggaactgctagagtcagagccggggctgaacaggacagtgaaacagaccagttgtagtgaaacgcagacagagatttacctaacagcactacactgggaagagcaagcaaagaggtctgatgacccttaaagcccgtcagggtcccggcataaggctcaggtataaacagaaggcgagagctgtgcatagccaagcggtcctggtcaaggtgtgctcttgcccatcactgacccagccttgtctcagtgccagctctcctgcagggggtcttggcaggctgtcagcactgtgtgaagtctcttcctgagaaaggagctcctctctgcctggcaccaaggctcctgtctccttttctcagtatgatattcccagggaaaggccagtttcatggatccattgtacacaagaatcccttctggaatattctcattctcgcctgggcagttacagtggggaggatccgcacctgctcgaacagggtggtttctgaggacagtgaagtcggaagcagaatttgtgtcctctgtccataaggaaagtgaccagggagatctggcagtgacagagcatggccctgggaggcgaggccttagccaaatgggaattttgaaacagtgaggtgagtgactaagaagagcagacaggaagtgaccatgaggacagagaaaggacacaagtctggcctggtcaccacaggcctgcggaggccaacactgtatgcttaaaatatgaggtcttttaaggacaagcatagaggaacattctgagaatagaagaatgctatggtatccctagtggttggggacggtgggtcagtctctgcggaggtggatgaagtgttgagctgagagacccaggcatgggcgagtgtggagcatcctcctgcctgtcccaggaggagaggcagagctatgctcagggtgtgctggcctggcagagcctgttctagcactgcctgccccaggccttgacagaggaagccactcactcttgctgtgtataccgccttggcagggagagaaaagacatggccattatagcagtcagagctgacctgaaaccaggaccaacccacatgcccattgcttgtttggagagtaatgttctcagtgttaaacacacacacacacacacacacacacacacacacacacacacacacacacacacacaagtgaaagtaaccggcaaggaatttctttatgttttaaaatcttgctcattatttatttctatgtttatggttgttttgcctaggtgtatgtctatgtaccatgtgcatgcagtgtctgcaggagccacaagagggcatgggatcctcctgttacagacagttgttagctaccatatggatgatgggaattgaacctgggtcctctgaaagagcagtcaatgctcttaactactgagccccaggcaatgtctgttttgtaaaaagtgtgtgttaccacccaaaccaggatagcaagccaaatccaaggccaagatggcccctgtcttttacccctatggaagacagggtggggagtggctgttcttttttggctgaggttgaacctcacagttcactcccagggggctaatgtggaaggcagccagcagcaagaaaacgaaggaaagaggtcttgagccagctgttctgggccatcacagtctgggaatgcagagggttgtgggagctgggaggctctgggtaaagtacaaggtgggagatgaaaagatttgaattcctttgcataaaattgtaggaggtagagagatttatgaattcttttgttcttagcaactagtcacctttgataggaaaactaaaacccatttttcacaagctgagtgtggaggtgcgcatctgggactcagaaggctgaagtgtgtgtgtgtcaatggcccactggtgttttcttatgaattctcctgggtggctcaaaacacatccattttatattcccttcctttaaaacaaaaaagagctcacttttagtttttaattagtgtgtgtctgtgtgtgtatctgtgtctccgtgtccgtatttgtcagcgtatgggtatgtagatgtgactacaggtgccaatggggtagggagaatggctttggatctcctgcaaccggagatacaggcaaccacccaacatgggtgctgggaactgagctctcgggcatgtgttcttaactgatgagccacctccctagccagccaacccgcttttccttcccccactctccttcattactttgtcttttcctttttgtttggcacagggtcctgtcatttccaaggctagcctggaaccaccgatctctttgccaccttatgagtaccacgtttttaaaataatgagttgtttccttcaaggcgatggatgaggtcccttttaagttttatatttttacaggtatctaccgtgtgtgtgcttatggtgtgtgtctgcgggcgtgcatgcctgtgcatgcgcttgtgggggccagaggtcagtcagctgtcttctgtcatgcttcagttttttgagtcagggtctctccctgaagctagcgctctaagttttgctaggttggctctggggatctgcctctgcaccctcccagtgcagggggcggtggggggatacagatgtgtgttgttggggcggagttggctggggatctgagttcaggatgctatccatggcaagcactcctccccagccgctgaattttacattagttatgcagtattttcaaacccggggatccaagtgctagttcgtattggagctgttggaggagagagggactcattccaggtgagagcttcataatttggttttagcaagaagtagtccaataaacttttaaatttgtcttagttagagttaactattgttgtgatgaaaatccacggccaaaagcagcttggggaggaaagggttgtgcctgtgtggtttgtactgactgagctggctctcttcaggccccacatacgtactttaaaaaataggcttatttttttattttgatgtgtatgtgtttgtctgtgtggggcagtggaccatgccagaaaactggataaggttgagtggattcagaaatctccctcctcttacacctgagaactatgggtgtttaatctgctcccaaccaggttcctgtcctgtaacacatgaccatggcaccccatggagaggactgtgacaatcagtcacctagaggcagcaccccagccctccacatgcagatgaggcatccctaacatctcagaccaagacaataggaagcatttactgtcagaccccaacccaccccaaaatgtataaaagaccctatccacaaggaataaagcaggagttatttcactaaggatcgtctgagagtgtctgtcataaagagctgtaacacttggaggaagagaagttctctcccggagaagctttctctactggaagctggtcaagcctacggaggtcacttcctgttccgtggccgcgaccttggctcctagccaatgtgctgcaccaactctggagcagaggtagctctgcagtagagacctggcaccttgcctacctgctcgcactggccctccacagagcagagcagcacagcattggcctgggacgatcaaccccccacccccaccccttcagagagtgcaaccctggctgctccagctgggccagagctctgcagatctctgcagataacatccggtacacagcatgtatgtgtgtgcgtgtgtgtccaggtgcccacggaggcccagaagagggtgttggatcccctggaactagagttataagttggtggtgggttccagggaccaagctccagtcctgtgaagagcagcaagcacttttagctgctaagccatttctccagctctgggatttttttttcctaaaaaacaaacgacatcatagtttatattttctgcagcttgattcccacccccacctctcctttagtggcacctcctagacatttcctaggacaggagatggggctcctctctctctttaatagccatataatctaaacattggctcattcataatttacaaaactatttctagttagtgtatttttccaggttattgcattgcatgtaaacaccaagaaaaaaatccttgcacacttacagtctcagcatataggatctatatctttgcccacaatatccatttccccatacctttgtgtgtgtggtacttgcatgtgtgtcagcacacgtttgtatacaggttcgcatgtacccgtgtgcccctgcatgccaaggtcctaggtcaactttgggtttccctccatcattctttacattattcatggaaacagggactctcaggtgaacccggagctcgatgattgggctactccggcaaacgagcttgctctaggggatgccttgtctctgccttctgatgcctagattttcagacaggctgcctggcatatatgtggattctggggatctgaactcctggcctcacatttataaggcaagtgctttatatcaactgagccatctcgacagccccttcccactctcttcctacactctttttagttttatgcaagctggtgttttgtttgcattttcttaagtagcctcgaagttaggtgtggctccatatatttagtaaccatatttacctccctcccggtgaattacttcatattctgcttattttagaaggttcatgtggaaggtggaggatcagaaagaagttcaaggtcattgttatagcaggtttgaggtatttgaaatcctgtctcaaaaagctccaaatggggaaaaaaaaaaaaaaggaaaataaatagagtttaaaattgagttgttggcctcccgggcaggaccttcatacattccagatgtcatttcgcagaatgctgcactcttcctgagcgtggcagtcttccgaaatccctgccctccgttctgccttcacagcttctccagctgcgcaagttcagttgaccgttctttccatgtttgattttctgatttttccccattattgctttctgctgggaactcctgtgtgaagtagtctggaagtttaaatggtcatcttcctctttgagcttcagctttctatgtggatctgggttttccttgtcaaccctgctctttaatggccaagtccacagcctgctctagtcctagtcctccaaacagcgcttgcaagatggtgctgagctgcaggtgactggtagttcgtgtgtgtgtgtgtgtgtgtgtgtgtgtgtgtgtgtgtgtgtgtgtgctctcatgccccctcccttcaagtgggcaaatgccatggtgtatgaggagaacatacaagtatcttttatttttaaatgttatttactaattattcgtttaaaggactttatttacacctgtgtgagtgtatgtcccatgtgaacaggtgtcctgagaggccagaagaggatgctgggttcccaggagctggagttaaaggcagctgtgagttgcctgatgtgagtgctgggaactgttctctggagacagcaaatgctttcctctccagccccacgggtgtcattttccttttcttccagatcctctctgtaggtctagcagccaacaatgccgagtcttacctgaactagtctttttattttttattttttacatttctttattatcaatgcgtgtgcgtgtgcatgcatgctgtgtatgctgtgtgtgtgtgctctatgtgtgtgtctatatgtgtgtgtgtgtgtgattgagtgcacagtgccaggtgtgagtatgtggagaacaacttgcaggtattggctctgtccttcctctgttgcatctggggctggaactcaggttgtcagcttgggtggccagtgcctgtccccactgagccgtctcacccgcctctgcatcagtctttttagtggtggttgtaaacactggcttagtaactcatgtgcacactgtgcgtttaccagcccgccttggctttctgtggtcgagagccctcccttctccctctttctttagtacttaccataggtatggctctatgggttcctgatctcctttgctatgtagaggtcatgggtgctgttactcaggtatctgtgtggagacaggctctctcggaaccaggaacttgtcatgtagactggactagctggccactgaggccgagctccaccagtctgcctctctaagccctgagattcacaagcatgcaccccccaccccaactggctttctcctttcaaattcaggtcctccagcttacagggcaagcactttcctgcctcagcccccggttctgaattttgcaatgatgtgttttaatgagcttttctttgttgtaacaaagtatttggcaaaaatcaaacataaagagggaaggtgcagcagcctgaggccagcctcgaagtgagttccaggatggtcagggctacacagggaaacccttctctaaaacagcaacaacaacaacaacaataaacaaacaaacaaacaacaaagaaggaggaggaagaggaggaaagattagtttggatcatggacccagaagctcatggttgcttaggcctttgctttgagtctgaggtgagaggctggacgacatggaggagagtgggaagcaagcagagaggtccagtgcctgtcagcagggaagctgtctctctgtctctctctgtctctctctctctgactctctctgtctctctctctctgactctctctgtctctctctctctgactctctctgtctctctctctctgactctctctgtctctctctctctgactctctctgtctctctctctctctgactctctctgtctctctctctgactctctctgtctctctctctgtgtctctgtctctttctctctgtctctgtctctctatctctccgtctctttctctctttctctctctgtctctctctctgactctctctgtctctctctctctgactctctctgtctctctctctgactctctctgtctctctctctctctgactctctctgtctctctctctgactctctctgtctctctctctgactctctctgtctctctctctgtctctctctgtctctgtctctttctctctgtctctgtctctctatctctccgtctctttctctctctgtctctctctctctgtgcacacgtgtgcattcctgtgtgtatgtgtgtgtgcacttttgcatgtcttgtttctgtctgtctgtgttctcatttagatacattctaaggttctcacattctccagtcatttcctggctcttttgtacagtcagataatagggtggggtgttttctgtttgtttgtttgttttgttttttgtttgtttgtttgttttaaggcaaaggctgtgtctctggaatggttacctgcaaaagaaaaagcaaaatgagccacagtaaatggtctgtgtgtgacccaaacagggatcagatttcatctttcgggccagcccaggggtgggtatgtctggagtgactgagtgacagttggctgtcttaggtccttccctaatcctagcaggtcagctgcagctatggcctaagtgggaacatcaactttccttacttctgatttgcacttaaacaacagcaacaacaactagatctcatgtctggagagaagacagagaggttacatagcatggactctccgcacctgtattgggggctcccaactgcctgtaactccagctgcaggggatcagatgcactgcgcctgtgcgcacgcgcgaacacacacacacacacacacacacacacacacacacactcccgcgtaatttaaagggggctgggggtgggggtaggggaaggccgggtctcatgcttctatttctggcctcaagctccctatgcagctgaggaaacttctggttttacatttgcctccacacaaggtttatgtgatggtgcaggggatcaaacctagaatgccgggctggcgctgtatggactgagccacatcgtagtccctgttatttttgaacttgaaacaaaacaaaggttttgttcttcagtggttatcattggcaaggaaatcgactttatttaaaatgaaaacagacaaacaacagcagtaaatggtcctaggcttattcggtaaatgtctgccttacaggcatgaggagctgagcgcagatctccggaattcatgaaaagccagggagggctgtgtgcacctgggaccccagcactagggaatgcagacacaggcagaattctgacgttcattccaggttcctcaggaaaccctgcctcaaaaaaataaagggggctccggggagatggcttcctgctgagactgtaccagagtttgattctgcaacccatgtggtcgaaagagagaaccatctcctacaggctgctctctcatttccacacatgtgctatgacatggatgttcacacatgcgcacgcgcgcatacacacacacacacacacacacacaggatgtaagttattggaattaaaataaattaaaagtaaaggtggcaaatgactgaggaaagagagccagagtttactccttcatggatgtgtgtgtgtgtctgtgcgcatcctacactataaggtacatacagcacatgcacatacatgccaaacgtgcatactaaaaccatatatctgtgtagtgcataatttggttgtctgcatgtgtttgaaaggaccctgcccccagcctggacaaatgttggtttatttacatcaagttcacagaaacagggttggcggtgagaaattgtgggcctttgtgtggtgtgggttccaaccgcattccccagccccatctctgcaggaaacagttagtggttgtaaacgaggccaaaggtattttcaagttcctgaatcacagccttgtggggctcctgtaccccccattccttctatttctatccccacttagatgtgcttaattatctagttaattgcttagctcactcattaaaaagcacataattagcatagggggagtaggtcggatggatggatggatgcctggtgtgggcaggtacctgaggaagtgcagggaaggcagatctgtgaccttgacttgagcagcccaaggccatgcctggagctcacaccaatgctaaggggtcccaaatcatcaagcaaacgacaaattatgtccagtctgcctgactgcaaaaacagataaagtgcatgagaaatagtttgcaaaacaacctatgccctcaaaggatttaaatacaagaatgtctaagtctaagacactaagcagagacacacagttagacacacagttaacagtgaatgctaggccaggtatggcagtgcatgcttgtatcccagcactcaggaggctgggatggtaggggagagtcctgagttccaggccagcctgggtgacacagtgaaaccttgtcacaaaagaaaacaaaacccaaacattgctccaaccgaacaaatcagtccccataaagaaggcagctagggagttagcttcatcagtcgggatctccgtgcaagggtgaagaccagatctcagatccccagaacccaggagaaaagctaggcgtggactccacatctctgactctaatgcttgggtgacaaagacaggaggctccctgaactttctggtcagccagcccagctgaaacagtgagagaccctacctcaaaagacaaggtgggaagccaggtgaggggcacaagcctttaatcctagcactgtgggggcaggggctgtgatggtgtgaatgagatgtggctccgttgcttgggcatttaaatgcttaggatgttgtttggagaggcttaggaggtgtgtccttgctggaggacccaacctctgcctgcagctgtgcttccctgctgaaggactctcctccccctgaaacctgaggcagataaacccttcctcctataagctgccttgcttgctttcggtgttttatcacagccataaaaaagtaactaagatggaagtacaggcatgtggatctctgtgagtccaaggctagtcagggcttcagagtgagtccctgtctcagaaattttaaaataattttttaaaaggttgaggagccagcgagatggctcggcaggtaagagcactcccagggaacccgttcagttaccagtacccatgtggggggagcggcaacttcagctctaggggctctcttttgacctctgagggcacccacacatttatgatatgcacaacatagacacacacacatacacataattagaaaaaatacaatagttagtgacaaaaatacctgacatcaccctctggccaccacatatgtactatacacacacgctatacacatacatacagagacatgctgtacatacactataacactcacagacacactatacacatactatctctctgtctatacatatacatatacacatactacacatacatgcatacacatgctatatacacacaaacatgcaaatatacatacacactatatgtactatatatacacacacccatacaatatacatacacacatatacatacatttgtactcaaacacatatacacataggcacacacacactatacatatatatttttatacacacacatactatacacatatgcacacacatacatatgcacatacacacatgttcacatatacactatacatacatatatacacacatagactcacacatacacccatgcacacactctatacacagacatacacactctacacacatgcatactatgtatacacacatatacacatatatacagactatatacatgtacacactgtacacacagacatacacttacactctagacatgcatgtacagtgttttaggcattctgagtgattttttttcgagtccacctgactttaatttttttttttgtaagtttgagacagggtcttttctatttatcccaggctaaccttgaaggctatatatagctgaagatggccctgaacttacggtcatttttcctctgctttctttagtgctgggaataaaggtcacttctcttgcttcgtccatccggtctttcgataatgtcattttttcccccagatgttatttttgcccctgttaaagttgatcaagccctttctaacaccagcctgcaatgtcctttaggggtgtgtgttgacttctgttccagtttgtattggaggctgggatggtgggtgtgtgctgcccccagtggttagcctttgcctacatctcagagaggttttgtggttctctgtgtctcaggctggagcttgctttgcctgctaattgcctgactgtggagagatgctgtggctacagctttttaggggaaactcccctgcttcagggtctctgatgatcaaggagcctcttggttgttgttagaatgtttgttcctctaacacattcaaaacaattttaagttgttttttgcgtatggatgtttttgtctgcttacacacctgtgtaccacacgcacgcctggtacctgtggagcccagggagtgtatcagattccctgggactggagttacaggcagttctgagcccctacgtgggtgtggggaatcaaacccgggtcctctgggagagcagccagtgcttttaattgctgacccatctctccagttcattcctgtcccgtgtccccatcccgactcctctatcatcccccccccccccactttgggagacagactctggatggcctggaattcactttgtgaggcatctctggcttgggctgtgttgacttttataatgtgaccggctccttgcccccatccctagcagtgctgacttggaattctgcaactcccatttctgcttctcagctttgtcctatcctggttcctcttgggtgacttcagagttgccagactgtcaaggctctttctcttccagcccttctctctttgaatgagttaagtgtttctaaggtgcaggggagggctggagaaagggcttggtgctaagatgaccacccccaactccagccccaggggatctgacatcctcttctggcctctgaggtcaccgcattcatgtgcgtccacacatgcacacccagccaccccctccacacacacacacaatttaaaatgaaaatcaaacatttaaagtatagggatgtctgtcatatgtcatttgctttcaactggataggacacacaccatctccaagctcttgtttctgtcatctgcagctcctcacctgggccacctgtccgtgtgtcaccacctccgaccagcaggatggctgccaacaagggcaagagccagggctccctggtacttcacaaggtcatcatggttggcagtggaggggtcggcaaatcagccctgacgcttcagttcatgtatgatgaggtaagagatgccagcacagcctgcgcctgctgtgatgttgagtgtgtctgctccagatgtgttctatgtccctttccccgtggggtgtttgaaaagctgcagggataggggctctcagcagaagattctggttgccgacacagtggtgggtttagtggtcacagaaatggagggagtttctctgcacactgtatttccagcgttatgtgtcctttctttgagacaggagcaagggaagagagacacctctgtatatgtgctaattttttattttaaattatgtgcaagctgaaaaatgtgtgtgtgggtggggggggaggggtgatatttagaaaagtgcagttgccttcagaggccagaagagggcattgaatgccctggagttgaacgcagttggagttgcccaatgtgtgctctggggaccaaactcctagtctccaggagcagcaggtacttgtcaccactgggccgtctctccaactccaacattttttttttaaagatagaatctcctgtagctcaggctggcctggaacgcactatgtagcctaggatgaccttgaacttctaatcttcccatgcctccccttgctgggattataggtgcaagctaccttgcctagtttatgaggctctgaggatggggcttgggccttcacaggaaagaggtgtgcactcaaccaactgagctactccccagcacccggtcttgagtgtctctgaaagggttgaatgttaaagaacagaccctcagcctacagcaccttgggaagttgagctcagcaagagaggttaggtcaccggaagtgtgtccttaaaagagatattagagtcccactcccttccggccttcctctgcttcttggttgccgggacgtgagaaaccgtttctgctgttcctcgcaccacctcacctcctctgcctcacctcaggccctgaggaccatggagtgaagttctgaagctatcagtcaaaaataaaccttttctctttattaattttggggtgcgtgtctgtgtatctgtgtatgtgtgtttgtgtgtgtgaatgcatgttgcaccacactggaggtcagacgacaacagggacaagtcagttctctctctcatggactgcacgtgggtcctggattcgaatgccaacttttcacgcttggagacactcactaagctttcttgctaaccccaaaattcactctttcgtcatgtacattctaagcaggtgtgatcatgtatacctgtaatcccaacactccggaggctgaggcaggaggatcatgaattagaggccagcctgggctttgtagctaagcccagtgtcacaaaaagaaaatataaaataaggaattgttgtcttggtgggcactttccggttgctgtgatattaaaccttgatgaaagcaactcacaggaacagggttcctggggataccgtctgttattggtgaaggcatggctgcaggagcaggtggctggctggtcacactgtatccacactcaggaagccaagagtgaacaggaagtggggcaggctattcaactccaaggccaccttcagtgacccacttcttcccagaaggctccatttcctaaaatctccacaaccttcccaaacggtgccaccttttctaatattgccctttgatttgtcaaagttttacagtttcaaaaatgtaattaatttgttttatgtgtatttgtgttatgcctgtgtggatgcctgtgcaccacacgtgtgtagtacccacagaggccagaagagggcatcagattccctggaactggagttgtatacagaaagttaagctgccatgtggatgctgggaattgaactcagttcttctggaagagctcaattgctgagccacctgtccagccctgaaagcattaagttttactgaagtccggtttagagtggtgtgtgtgtgtgtgtgtgtgtgtgtgtgtgtgtgtgtgtgagacacgtgaggtgcacatgaagaggtcagtggaaacttgcatgactcagttttctcttccactgtgagccccggggtggaattcatgtcaggtttagtggaaagcacctttaccccctgagccatccccctggcccccagctcatttcttctttgctacttggactttggtctcattcctaagactttatgtctggttcaggctcactggtggttgttctgtgtttccttctgagtttctgtcttagttcttatgtctatactggcgctgttttcagttagtcactatgttttatgtgccctgcataagaagtccaatttttttacgctttttaaaaaaatgtatttacatgtgtgttcctgtgtttgagtgtgtggcatgaaaaaccttgtctcaaaaatcaaaaaacaaaacaaaacaaaaaaaacaaaaaaatatccacctgtccttgccgccaaagcctggcaggaaaggcgtgtttctccatgcccaccttccatccctcattttttcaaaagtaaatttcaaatttatcctgtgacggtttcacgcatgcatatactctatgtggatggcattcattctccatcctccagcctgcccacttcccgctctcacttcctcgtcctacagacgcccatctgtcttcatgtctgttctgtgggacccactgagttcccctcaggtgttcacgtggccatcacggagctggtgtactttgaggcacagtattattagattgctcaggctagccccagatctagccttgccagtgttaggctcagctgagatagttcagtgggtaagacaaccaccatgcatgcatggggacctgaacccctagagcccatgtaaaacctgaacgtagtagctagtgcctgtaactgcagtacttctgtgggaggatcagaggtgcagcagcagactccccagaagccagcccagcacatgcatggtgtcaagggaaaggaagagacctgcctcacaagcaagctgggggatgaggggtgatgcctgaggttatcctgtgacctccacgtatgtacagcacagtctctcccacactcctacccacagacatcacaaacacacatatgcgcgcgcacatacatacatacacacacacgtacacatactcacttatacacaaacacacactacatacacaaacacatatatacacacaaacacacataaacacataaacccacatatacacacacacatacacaaacacatatatacacacatatacacatgcacacatatacacacactcatacacacacaaccacacacacaagctaaataaatgtaattaaaaatgttaaaagggattgcattttatcaagagtttactaaagtctcataaattagttaatttttatgtgtgtgtctttattacaaaaaaaaacattcggggaggctaatttacttctttttttggcagtttttgaatttgttttgtctttgaggggagactacatccttctatacataggtaataatctctactctactggcgacctgctgcagaatgacacactgttattctagagttgtctacatgcccgtatagagtttccttcctcctttttgtgtaacagcgaagcactcagttgtatagccaaccttagctgggcatttgggtggaccttcatcttttgtgatgccctttggtgccaacagtgaccttgatttttgagccagcgtttctggagattagattcctagaagctagatgtggggagagtcagaggataaagtacttctcattttatcagatgttgacaaatctctccatgggatggtcctgtcccctgccccacagggagcaacaggtctttccccaaagcccatgtctcagggcagctcttcctcctctctcctgattgcttttctctccctccctctctcccttctccctcctccctctctcccttctccctccttcctttctttcgcactagtgaggagagcatgtctccatgctggctttggatgctcccatcagtgcgtgttaaagaggagtgctcaatgcactgtgtgcagctcagagttctggctagcgcttgcatcgtgctgcgctgtgctgggctgggttgggctgtgctgtgcctctgttgttttttcattcttgggaaatctaacatcaattttttttacatggcttctggactttgagtcatagtttaaaaagcccttctctacttcaaggtaataaggtgctaccatgtctactttcagtgcttgactggatttatttattaatttacatgtgtgtgtgcgcatgttcatgtatgcagatgcatgtgtggggggtgtgcacctacatgtgcatgcacatgcttgtgtgcctatggaggccagagagcatccccaggcaatggtcctcagatatggtccaccttgtttctgagacaaggtctttcattagcctggggctctctgcgtaggctggccttagctggtcttaggtggtcttaactggccttagctggcaatgtcacctgtcctcatgtccctggactaggattataagcatgcactattaccatgtctcactctttttttagattattttattatttttagttacatataccggtgtgtaaatgtgggtgtgtgcgtacgagtgcaggtgctcatgcatgctggacgcactggatcccctggagccaccaaggggactgtggtctgaacttaggtcccctaggagggccatagatactcttaactgctgagccctctccccagcctctggcttttgttgttgttgtttgtttgtttgtttgtttgtttgtttctaagagggatgtggggggtcacactcagctcttcatgtttgatgaccagcactttgtccactcatccatctccccgactctccgcttgttttactctacactctgattcctcttgccagattcccttgggatgatttttatagttctgctcattattaatacaggctcccgagcctcaccttttccattgtttgtattataattttatgctctattgacaatgatatcatcaagaattcttcttagtgttggcctttcttatctgtaaaatggggctatctgcccctgttgttgaaagctttaaaaaaaagaaattgaactcagagctattaaggcaggaagtgttcccaagcatgatgggacatgcttgcaattccaacatttggaaagtagagacaggaggttcaagaccagcctgagccacatcgtgtgaccctgttgaaggaaggaaggaaggagtgggttgtttgcattcttcagtgtcttctctgggtgtaatagctctagactcttagtgaatacaaagctgattgcaaagcattcagacgtagtgatgtagtcggggtgccgactgtactccttaattctgactgcttccccccagtttgtagaagactatgagcccaccaaagctgacagttacagaaagaaggtggttctcgacggagaagaggtccagatagacatcctggacaccgctggccaggaggactatgcggccatccgtgacaactacttccgaagcggagaaggctttctgctggtgttctccatcacagagcacgagtctttcacagccacagccgagttcaggtgtgcttgactggggagagcctggccctgaccctcctgcccggcggctgagggcgagggatccggggtcgagtggcctagtgatggccgggctctgatgaggaagaactctgccgtagggttctctgaatcttgttacactttggtctactattgtttctgtttctttgggcatccatgttttaggatttctgcacataccttttttaaaaggtggacttatttttatttatgtgtactggtgttttgcctactgtatgtctgtgtaccaagtgtgtgcagtacatacaagggccaaagagttctgagcgtgccaatagaccccaaagttgtctgcaagagcagccagtgttcccaactccaaattctgttataaagaaatagtgagcattggggggtacttcttctgtagctggttcttcaccacaccacacaagctttcccactttcttatataattgcaaattttttcatcgactccccttaaggacagaataccctagttagtccgcttatcagaaaagaagttactgtggtttgtggtttctgaggctaccaaccacgatcatgtggcctgttgctctgggcccaggggtagggggcatgcagcatggtgggggttatgttactgaaggcttgtgtggtacacggcagctggggtgcaaaagagggagtctagagtcccagtgtcccttcccagggcacaccccagagacctatcttcttcccaccaggccctgcctcctaaaggtctctaaagagctgaaggttctggcttgctttctgcagctgcggtgtgtgtatggaggagacgcacagcagagaactcagcgtgagctcttgcggctgcagattttttttgagcattcaggaagtttctatgtgggtaacacttttgtgatcacaactgtgtttcctcttcataatctgattttgaggccatcccggagataaaacaggatgtctgtacacactgctttcttctctcccttgtgcctgtattggaattactaagcatttttgtgagctgttgctttgggtttgattggatttttttgttttgtttgttgttttaagtagtgtctcatgaagccttaaacttactatgtagctaagatgaccatgaacttctggtcttcctgtctcctgggtttacaggcgtgtagcaccatgcctgcctgtagagtgctgagaaggaaccaggggtggggggtggggaggggctctgtgtatacagtgggagcaccctgccatctgggccatgtccccgagattcacagagggtttcttcctgacttccctctccctttctctttgaccccataaattgggggactccgttgagatgcagactcctgacttcctatgcagacatctcttttgtaggagtatggggcagagaaatccgtacctgggagagaccagatgatcataatggacgaaagctaagggccagcctggaaaagcccctgctagtagacacccattttgaaatctcccgatggaatgatttctcttgttctttaccgagggctttagatgctctgtaaaccccgaggcacctggcagctacttgtaaagctgacttcatatgccagcttttaaacaaaacaaagcaactttatttatttgtgcgctgtgcgtgcaccggcatacataccatagttcacgtggaggaaggaggacaacctgcaggaaccagttatcaccactcacagtgtagatcaaacccaggtcctcagactgccttggaggcaagcactcagccgctgagccgtcctggtgcctctcccgccagttttggctttcttaaccacactgttcttgccgcaccgtccctagggaacagattctccgagtcaagtcagaggaggacaagatcccactgctggtcgtgggcaacaagtccgacctggaggagcggaggcaggtgcctgtggacgaggcccgaggcaaagcggaggagtggggtgtgcagtacgtggagacatctgcaaagacccgcgccaatgtggacaaggtaggacgagttctggaggcttctcagaatctggcttttgctgtctcaagacacagccatctcgtttgcttggcttttaattttatttcaactctgtgtgtgtgtgtgtgtctatctatgtaggggtatgtgaatgtaggtgcttatagaagtaagaaaaatcccctggaattgaagttgcaggtagctgtgaactgtctgatgtgggtaccgggaactgaattcaggctctctgcatgagtggcactctctcctgaccactcagccactgtggctgctgcctctgctaccactgcccccttcttcttcctcctcttctcctccttttcctcctttcttcctcctcttcttcctccttctctttcttttttctcctcttccttctcctcctcctctttctcctccaccttttttcttttgacagggtctcgtaccacccgcagtctgacctcaagcttggttatgtaggcagtgtcacacctgcagtctgacctcaagcttggttatgtaggcagtgtcacacccgcagtctgacctcaagcttggttatgttggcagtgtcacacccgcagtctgacctcaagcttggttatgtaggcagtgatgactttctagtccttctgcctccatctcccaagtgctagcattcaagctttgtgccatcacagttgacttgtcatttttctgttttcctttttcttttttcatcctttttttttttgttttgtttgaaagtctcacacaggctagcctagagctccgtaagtagctgaagagacccttgaacttgtgatcttccagcctccagccctctaccttccagcactggaatgacaggcgggcatcatagcacccggtttatgcagtgctgggaatggaacccagggctctacacaatcacatgaccgccctgtggtttttcttttacatcagagttcagagtgttagcacacagttgaagtaggtgccttacagctgaacttcacgccgttttcccatgctgtgctgtgggctcttacttcacatcctgggcttgtgaaatcagtgcagagccagggcaggcagaacagaagggctatgtctgcacccagttatgctcggccacagatctgtctacctcttcttgttctcagttcacactgtagcccaggctagcgctgtgggatgtcactccctctctttgtaccctaccaaggagagctgtttgactagctggttctagaagagggctgagtactctcaagggacattcggaggacctggctttaagagcttggtgctctctgtagcctggggcacagtgagttgtgttccatcgtcagctagattttggttatcatgtgggccccagggaattgagttcacgttgccaggttcttatcctccaccgcaccatgtccctggttctgtctgtctgcctgtcttctgtctatgtgtgtatgtgtgtgtctatctatctatctatctatctatctatctagacagggtctcatatgctctagactgacctgtagatctcgtgtgtgtgtaaggagtgctagaaacacaggtgtggaccgttgcacctggtttgtgggtgtcagggtggaccccagtgcttggcaagccctctcccagctgccgtatcccagcatctttgttttctttacattgttatctgaactctcacgttgcttcttatgatgctcagacttctgttcctagctgagggaaatacagagggcatccaggtatagccttagtcttctctggagaggaggagggtgcatgtttgagacaaggtgtagtgctagttgtcctctgcctcccacacccggactaaggctttatgttttaaaaccaagaaggctgtctggtcatggtagcacatgcctttgatcccgctactcagaaggcaggagctggcagatctctgtgagttcaaggccagcatagtctacttaaggagaccttgtctaaacaacaacaatgaaacaaaacacagactttttcagtatgaaaatgctgacgtttttgagaaggctggagtcagtgctctgggatctcattctggggcggggtgcacaacatcatgtccccctcctctccctggacaacctttgacctgcaggaaaaacccagcaggaacttgtaacaggtaataagtttttttcagtaaacacttcccttcagaaaggccgcggagatagatgcccagcccaggatcagtgtgggccgcttttggttgaatgctccacaggcctccctgccttttatcacaggatgaaaccaaagtctgtggtttggacccagggctgtgctagcaaaacggggtgtagacatcagcctgagacacttagggttcccttccctggggctggggttcatgtaagctcacatgagaggcataacaggaaagcagtcttgttttgcttcatttctgaaacagtaatttatatgcccagactagtttcaaatttcaaatttgttgtatagtcaagttgaccttgaactttgaacctttctagacctgtgacatcacacatgacttctctctctctctctctctctctctctctctctctctctctttctctctgttagttttattttttttttctttattgaaaataatgacagggtctcttctccgccaggctaacctctagctcagtatgtagctgaggaggacttgaactcccgatcttcctatctctgcctcctgtgttctaggattacaggtgtgcatgcctggtttgtgcagtgctggggatcccatccaggggcttgtgtatgccaggcagctgctctgccacctcagccccagccccagccccagccccagcttttgcttgcttttccctttggttcgtctctgagaatcagcgcagagatggcggagatggaaaagctagtgttctttgtcctgcttccagttctgtgggaaatctccagtgtgtctttgcagggagcgtattttgtctgccagggtttaatcagtcccttggcaattgctggtcgcagagggtgaaacccaaacctcactgacacatgataacgcccgtctagataattcgcagtggctcgtctttcttgataacattcttcttggcagtggggggtggaaatgggggtgtggggctgaggtacgggaggaggaacgctgtgataagacttcactttcttctttctcccagctctccagttcaggaacctgccttcctcactcctgcccccttgctttcctagatttgcccttggtggctttcaaagtaggatttggggaggggcaaatcatttataatgccattccagcctttgtagttcaacaaggtatggtgacgtgggacaaagcagagattcaccctttatttcttctctctctctctctctctctctctctctctctctctctctctctctctgtgtgtgtgtgtgtgtgtgtgtgtgtgtgtgtgtgtgtgtgtgtatacacatgttcataccatcaggtcattgtgctcagtggcaggggactctgcctgatgaggctgcccttcacctttcttggaaataggaggcagacactcacaggccatatcccttcaaatgtttgaatttcgcacaccatttcaaaaaccatgcttgccaaagcacatttcacccttagtatataattaagaagagatccggcgacggtgacaggctcttcctgtccatgacagctgtgtggaaaggcagggctcttctgctgggagagaggaggctctcattaaagcggattcttactgctgtctgtcgacgccttgctgtttattcgtgatgctttgtttgtaacgaaacaggctcataagcataagcttgggggctggagatggacttattgatagaactcttgcctgggaccatcatcagtgtcacgtgacctagccctgggatgcgtaggaaagccaggatgcatggccatgcacagccagttgaggccagcttgggctacaggagagcctgtctgaatgaataaacgaatgaaagaacgaacatttggaccctgtacataagagttgagtgcaccccacctccttattcttttctctcttcctctcacttctaggtattctttgatctgatgagagaaatccgggcaaaaaagatgtcagaaaacaaggacaagaacggcaggaaaagcagcaagagcaagaaaagtttcaaagagcgatgctgcttgctgtgagcgggctgcagactgacgcagcagagtgggccacactgcagcgcagcgagccggaggtggcctcccagctggctccccattcgctctccacaactgcattcactatcacttcttgagatgggacagatatccgtgcgtcagtggctggcagaagaaagacgcctttgtctgtgtaatgcctctgttaactttgccaggagctttgagagtctgccctctcccacccttcctgaaccatgaccaccaccagctctagggtcgtaatgttggagatcaggaatattggttgtgatgacaagaaagagcccacttactcctcctcgttctaggacacggtcatctttccttaggaaattaaaatgcttcatattatctgggcatggtggtgcacccctgtagtctcagaactctagaaggtaaggcagggagggtagcctgagcccaaggccagcctgggctacctaacaagaccctgtctctaaaagaaaaaagaattaacatcttattttcttagattttaagagagagtctctggcaagacccccctcatcagttctaatcattttagaagtagacagaaaaaaatatctaagctcaggtaatactgaaaaagccaaaatgttttgtttcgtttcttttttttttttttttttaaagataaacttgtgtagtttggaagcagatttagaaagatgaacttcacttgggccagataggctgaaccaagcttcctggcgtttgtagagaaagtgggacgctgttctcttcatatttaaatgccagccaggtgctggctgtgggctttccctcctcaacacccttatttagaaaggaaactgtgtggggggagatgcaggcctgagccccatagcgagcttgccttttctgactgggtcttctggtcccccctacaccagccataggcctgttctttttcttccttctgaaaactgtgaccagttcaaattatgactcagaacgtagggccagcaccagctacctctgcagactcccagtgactctctcttcacaagcagatgaagggaaggctcagaagggcatctcctgtagctcctggcagctggttctggtggcactgagatgagtgccaccagaggctcacactcactctctgttgagcttcttcccagggaaggggattctgggacagggggctgccactaagcacacacactcctcctattttccagaagtgaacatttcatgtttaggtgccgaatgtgaatctgggtggggagagcgggagcccttcgaatggattttttttttctttttttacagaggttatgggaactaaggtctgatccctggaaactgatcttgtgtcacttccaaagaatcatgggctttttcg

SEQ ID NO: 187 - DNA, 2219 bp, Mus Musculus
gggcggacagcgggaacgcgctccggggggtggggacgcgcgagctcaccactcctcaatgacaaatcgactggggacagctggggtccggccccaggacggggcggggcgctcgtgagagcggcgattctggttgtgcgcatagccagagcggcggtgggacggctcccccagctcctcacctgggccacctgtccgtgtgtcaccacctccgaccagcaggatggctgccaacaagggcaagagccagggctccctggtacttcacaaggtcatcatggttggcagtggaggggtcggcaaatcagccctgacgcttcagttcatgtatgatgagtttgtagaagactatgagcccaccaaagctgacagttacagaaagaaggtggttctcgacggagaagaggtccagatagacatcctggacaccgctggccaggaggactatgcggccatccgtgacaactacttccgaagcggagaaggctttctgctggtgttctccatcacagagcacgagtctttcacagccacagccgagttcagggaacagattctccgagtcaagtcagaggaggacaagatcccactgctggtcgtgggcaacaagtccgacctggaggagcggaggcaggtgcctgtggacgaggcccgaggcaaagcggaggagtggggtgtgcagtacgtggagacatctgcaaagacccgcgccaatgtggacaaggtattctttgatctgatgagagaaatccgggcaaaaaagatgtcagaaaacaaggacaagaacggcaggaaaagcagcaagagcaagaaaagtttcaaagagcgatgctgcttgctgtgagcgggctgcagactgacgcagcagagtgggccacactgcagcgcagcgagccggaggtggcctcccagctggctccccattcgctctccacaactgcattcactatcacttcttgagatgggacagatatccgtgcgtcagtggctggcagaagaaagacgcctttgtctgtgtaatgcctctgttaactttgccaggagctttgagagtctgccctctcccacccttcctgaaccatgaccaccaccagctctagggtcgtaatgttggagatcaggaatattggttgtgatgacaagaaagagcccacttactcctcctcgttctaggacacggtcatctttccttaggaaattaaaatgcttcatattatctgggcatggtggtgcacccctgtagtctcagaactctagaaggtaaggcagggagggtagcctgagcccaaggccagcctgggctacctaacaagaccctgtctctaaaagaaaaaagaattaacatcttattttcttagattttaagagagagtctctggcaagacccccctcatcagttctaatcattttagaagtagacagaaaaaaatatctaagctcaggtaatactgaaaaagccaaaatgttttgtttcgtttcttttttttttttttttttaaagataaacttgtgtagtttggaagcagatttagaaagatgaacttcacttgggccagataggctgaaccaagcttcctggcgtttgtagagaaagtgggacgctgttctcttcatatttaaatgccagccaggtgctggctgtgggctttccctcctcaacacccttatttagaaaggaaactgtgtggggggagatgcaggcctgagccccatagcgagcttgccttttctgactgggtcttctggtcccccctacaccagccataggcctgttctttttcttccttctgaaaactgtgaccagttcaaattatgactcagaacgtagggccagcaccagctacctctgcagactcccagtgactctctcttcacaagcagatgaagggaaggctcagaagggcatctcctgtagctcctggcagctggttctggtggcactgagatgagtgccaccagaggctcacactcactctctgttgagcttcttcccagggaaggggattctgggacagggggctgccactaagcacacacactcctcctattttccagaagtgaacatttcatgtttaggtgccgaatgtgaatctgggtggggagagcgggagcccttcgaatggattttttttttctttttttacagaggttatgggaactaaggtctgatccctggaaactgatcttgtgtcacttccaaagaatcatgggctttttcg

SEQ ID NO: 188 - protein, 206 aa, Mus Musculus
MAANKGKSQGSLVLHKVIMVGSGGVGKSALTLQFMYDEFVEDYEPTKADSYRKKVVLDGEEVQIDILDTAGQEDYAAIRDNYFRSGEGFLLVFSITEHESFTATAEFREQILRVKSEEDKIPLLVVGNKSDLEERRQVPVDEARGKAEEWGVQYVETSAKTRANVDKVFFDLMREIRAKKMSENKDKNGRKSSKSKKSFKERCCLL

SEQ ID NO: 189 - DNA, 41862 bp, Homo Sapiens
cgagcccggctgctcaatgacaaatcggtggaggacggctggggtccggccccgggagggggcggggcgcgtttaagagctgcgggccgggtgcggacggcggaggcggcgggactggtccctggtaagggcgcggcgcccgcgggccccgggcggggtggggcgcgggctggggagtggggtacgccgcacgcccgcagcctcttgctccctccgtgccgggctgtggccgggcggcggcaggacatgtcgcgccccgaggccggcggagggcgacgccccggcagcggccccgctccgctccgggaggactccctgggggagtctcggcttcctgggctgcctggggctgaggaagtgggggcggcctccgcctctcccttgtagccgcggttccttccctatcccgcagatggctctgcttccacttcctgccgcgggcctcccgctcgggaccgtccacttcctcagtcctccggccgcggcttgggcagggtcagggctgggaagtgttgcaaaaacttaactgccctcggaacttgcacgcgccgtgaactgggcggtgttcctaaagggcttcggtttgctggttttgttttggtcctgtcttgcaaatgagcataaagttgtttctcccccagcctcctcccctttcctttctgataggggccagcggcgaaggggcttctaaggggaagcgcctggactgggcatcgccgtcccggttcttgccgcctgtgggagtgtgaggttaaccgtgctcggtgcagggttgcggggcgcggagcttgctgcgtccacactgcttgtgtgagcagtgtcctctctgtgctcatttccaacgagaaacgttggaactttggtgttcttatcaggtgagtcttcgggagagaagtgcttgtgcctggcggactgaatgaattggccgtggaagagacttggctgattgctcatctgggttacctgtgactcatcttcagcccttgtagaacagtgcactttctgctctgtcctggtttcctaacctcatttcttctgaagttttggggatggatggtgggcatggagtatcagaggggatagtgaatcttttagaggtgtcaatgactgatgttccaagcagagccataagattgttggatgtcaaagctcagaaccggtcaaggctcagaatgctccttaaacctggagcaatagaagcacagtatcgaagttcccagaaatgggccgaccatgaaaggtagcactgcatattgggaaaaacaggaggggtgagtttgaagacctgggtttgatgcaggttctgagagtttaccggtgttgtgatgtggagcacgatctttccccctctgagctccagagtcagcaactgtagaagggtgatgatagttatcctaattgttaggattaaacgaaataggagcgggggagaagaaggccagggagacatatcctttgtgcgtggctttagttgtcagccggtctgctttattctgaccacatctggggctttccttccttgcccattcacattgcttcccattggaaacagcactcttatcggagatctcagccagatttccctctgcccgaggaatagaacattttcccaggattgtgtgtggaaaatagtgtaagttattagatatcttttgggaacttgggacctagaccataaggataaacaggatttagagtcttccacggcatatgaagagattttggtagaagatgagggtagaaaagttctaaattcttgccttgactgaagatggcttgagattccatgaaaaattttaagcctgagaattgagataatcctttttttgtttgtttttgggggcagagtcttgcgctatttcccaggctggagtggagtggtgtgatcaccgctcactgcagcccccacctcccaggctcaggtgagtctcccacctcagcctcccgagtagcttggtacagtcttgcaccaccatgccaagctaatttttgtattttttgtagagatggggtttcaccatgttgcccaggctggtctcgaactgctgggctcaagccatcctaccaccttggcctctcaaagtgctggggatcacaggtgtgagccaccccgtctggcagggataattctttcttccaaatcacgtaatcctactatgcctctttgcatttagttgctaaattcttacccccctcatgtaacttatggaagttagaaacatcattagagacctttcttgaaagctaaatttggagacaatgtaagactagagtgcgaagagatctaggtgaactctgtagttttccagtgtaacttgtctccagatggtatacaggagtcccacttttccttggctccagttactgctaaacagcccctgctctagacatgcaagacgcttgttttttttttcgttttgtttttttaaatgaatgcatgttctgaatgttatcgcaaagagagccgagtacagaggagaaggaactcttccttcatcacatggcggagtagttaaggaggagaaaaactaacagttactgagcatcagctgtctgcttggcacagaccactgatccaagccataccagttaaatatgtggccttggagatttgaccatgggccgtctcctttagctcctcagttcttttggtacctaggaatataaatattggtgtatgtgtacatatattcttagatattccaaaaagcagaggggccagtaggcaagagggttaatgagtcttggataggtgacagtggaaagaaagatgaagaggatgtggaagtgagtgtcaaagagggacggtatatgtgcttactagaagcaattgcaaaattctagccaggtctcaatttcaagtttgtcactttaaaaaaagtagctgcttataattttccttagtgttctcctggctgtttttgtttttggtgatggtggctagttgttttttagttgaaatctaaatgcagaaaagaaaaatgccattaattgataattaccaatatattgttttcattgttgcttttgtcagtgctttgtgggcattttttatatatagcattgttccaagctatacggcatgagatgaaggaaatatagtagtttggtcctgcgtgcctggctgcctgtaaagtttgcctaccttttgaatgagttttctgttgctgcataacaaatttccccaaacttagcagcttaaaacaacagacatttatgatctcacacagtttctgaagttgaaatctggggacagcttggctgggtgcttctggctcatggtctctcctgaggttgcagtcatctgaagctcgactgggaccagaggatctgtttccaaaatggcacgttcacatggctgttggctggaggcctcagttctacaccatgtgggcctatgcacagggcttttcacaacatagcttttctccccagagcaagtgatctgacgggggtggggagagagggagagaatgaatatgataatgatcaagatggaagcagcagtatattcgtggctgatatggtttggctgtgtccctacccaaatctcaccttgaattgtaatccccataatccccatacgttgtgggagggactcggtgggaggtaattgaatcatgagggcagtttctcccatactgttctcctgatagtgagttctcacgtgatctgatggttttacaagcgtctggcatttcccctgctggcgctcattctctctcctgctgccctgtgaagtggttccttctgccatgattgtaagtttcctgaggcctccccagccctgcggaactgtgagtcaattaaacccctttcctttataaattacccagtctcggatatttcttcatagcagcatgagaacagactaatccagtgtctaatcttggagatggcataccatcccttctaccagcattcagaccagacctggtacaatgtgggaaaggactacaagaggggaggtcagggcacatcagtattcttggaggctagccaccacaacttttttaaggtttagtccagacatcattgagaaaatctttctttcagatgtttactgaagtatactgtaggagatggaaagacagctgaggtctttagtattgtagaagctttaatactatatgtgaaacttttatgttctttcttctggttctttgttagatgctggaattagccaagtatgcagtagctttggaaatagaaattcagatcttgctggtccctaaaccaaaaggaacatctggaatttttttctttaaccccaaaacaagttggtaaaaaaatattgccaaagtaatctcctttgatgaatggcttaaaattagtcattcattatctgtgtgttcttaaaaataaaactcattggcaaagtagctgaaaaattttggggaacctaaaccctcttactcctccccattattttaaaactttggatactgcttgtttgcctagcaattcttcagttcacttttgagaccctcatacattttaattattgacctggatagaagggcgctattcttttagctccagatgaaatcttcctgaagtgcctataggtggagagaagagtttctggatcctgagcctgagcctggctaaatgacctctaagtcccttccatctctgaaaattctatgatccttatttttttttataacgaatatcctttgagttgtgcatatttataacaaaatatttcattgatcatgttaaattgcaacctcagaagacaagcttttctgagaatagcttttgttcttcccaatccagttgaaggttgttagagtcactgttaggcagagttgaaaagtcagcactatttgcacttcctctgcttcctatttttggccccttgcccatcctctgccctaatttatgagctagtatctttcttttctttcattctactttccttgtaatccccctccttcctcccacaggaaggattggtggccagtcctttactgctgatagctgatgctattgttaggaatgaattttagccaatgtgttacctctagtaatacttgcatggcaaaccttttaaaaatctcaaattatatgtgttcatgtagtaaacactgccattttttaacatcctaagtagccctaaaatttagtcactttcctcatgtgcattgttgtctccttagtccccaccgtgttgccggcctggcctggtgcatacccacatctgctcttgacccctctgtttttctactctgtagccagaattaccttttcaacattcaagcctaattatgttacccattgacttgaaacacttcagtggctttccagtgctttcagtcaaaggtcccaaatccctcaacttggcctacactggggtcttgaatgatcccgcccttccttacctcctcagtgtcatcttgtactgggctctgcctctttctctctgctgcagatagctgtgaaggtctttctcgagtttcttgagtggactttgcttcctcttgcttcaggccttcctgaatgcagtgtgtgtgtgtgcaggcacgcgtgattgggggtgggggagtgtggaggagtcctaggtaggaaagcgcttggcacattcacagggctggaagaaggcaaggaaaaggccacggaggccacggccagtggagggtttagctgccgctcatggtgagcctttaaggagcgttaagcacagtttcatgtgcagtgttagaagccccattggaagggctgtgtggagaacagattgaagaggggctggagtggtaatgaggggtcacttaggaagctggggctgttgaatgaatggtggcagagaagatggaagaagtgcatggctttgaaatgtatgttggagatggaatagctagaaatggtcatgaattgagctggggagaggcaatgggagtcaaaaatgacttccaggtccctggctttggtaacgatacggatactagcgtgtccggaattggtgggttcttgggctcactgacttcaagaatgaagccgcggaccctcgcggtgagtgttacagctcttaaggtggcgcgtctggagtctgtcccttctgatgttcagatgtgttcggagtttcttccttctggtgggttcgtggtctcgctggctcaggagtgaagctgcagaccttcgcggtgagtgttacagctcttaaggtagcgcgtctggagttgttcgttcctcccggtgggctcgtggtcttgctgggctcgggagtgaagctgcagatcttcgcggtgagtgttacagctcataaaagcagcgtggacccaaagagtgagcagtagcaagatttattgcaaagagcgaaagaacaaagcttccacagcgtagaaagggaccccagcgagttgccaatgctggctcgggcagcctgcttttattctcttatctggccccacccacatcctgctgattggtagagccgaatggcctgttttgtcagggcgctgattggtgcgtttacaatccctgagctagatacaaaggttctccacgtccccatcagattagttagatacagagtttccacacacaggttctccagggccccaccagagcagctagatacagagtgtcaattggtgcattcacaaaccttgagctaaacacagggtgctgattggtgtatttacaatccctgagctagacgtaaagactctccacgtcctcaccagagcagctagatacagagtgtcgattggtgcactcacaaaccttgagctaaacacagggtgctgattggtgtatttacaatccacgagctagatataaagactctccacgtccccaccagactcaggagcccagctggcttcacctagtggatcccgcaccggggctgcaggtggagctgcctgccagtcctgcgccatgcacttgcattcctcagcccttgggtggtcgatgggactgggcgccgtggagcagggggtggcgctcgtcggggaggctcgggccgcacaggagcccatggagtgggtgggaggctcaggcatggtgggctgcaggtcccaagccctgccccgtgggaaggcagccaaggcccggcgagaaatcgagcgcagtgccggtgggccagcactgctgggggactcagtacaccctccgcagccactggcctggctgctaagtccctcattgcccggggccagcagggctggctggctgctccgagtgcggggcccaccaagcccacgcccacccggaactccagctggcccgcaagtgccgcacacagccccggttcctgctcgtgcctctccctccacacctccctgcaagccgagggagtgggctccggccttggccagcccagaaaggggttcccgcagtgcagtggggggactgaagggctcctcaaatgccaccaaagtgggagcccaggcaggggaggtgcctagagcaagcgagggctctgaggatttccagcatgctgtcacctctcactagtagtgacttcagtagctaataaatgggggatagtgaaggagcagattttaagagggaagaatcaagaattctattttgggaataagttgagaatcttgtggcagcccagtgggcaggggcagcagcaaggctgtgagcctggggccaggagagcggtcagggctgcatcctcaggttcgtaagttgtctgtacagccactgggctgtatgtggtgcagatgaggagggagcaagactgagctccgagaagtgctgacatctagatggggaggaggaatgcctggcaagtggcgccgagaaagggcccagagagccacccgggaagcactcagcctgtgggagaatgtgggctgtggaagccaggagggatggcctcaggagggggacgctggaaggggccctatacaggcctgctgcgggccttccctttccaggcagcgttttgtcactcttgctacttgctcattttaaagaggaggagggcatgggaaggaagaaagaagagtttttattggagctagctacgtggagtttgtgggtgatcttgatctcacaaatttctgtgagcttatattgggaggaagttggattggaatggtttccgtaaatagtgagggaaggaaacaaaggcttttgctacacagtgtggggtctgtgggtcaggaacatgattagagactaggttagtggtgccaaatcttgggctccactccagacctactgaatcagaatatgcgttttcacaagattcccaggtaaactatgcattaaagtttgagaagcattagcatagataattcctatagaggaattgtgtcattagctagaaggatatatgggggtcaaaggcacacacgcatgtgcgaatctttagggtgaagattcaatagaacgtgtctacatgctgttggggatgatcctgtagcaaagtaaagactgattgatgctgcaggaagaagggtagtggtaggaattaagttcttgggcatggtggtggtggagggcttggcctttgctaagagcaggaatgtgtactccatgaggctggagacaaggagaagaagggcgtggaaggtttgtagatttgttgaaggagctctgagggagttagggtttgatggcttggtgttctctgggacaaatgaggttaggttatctgtcaagagtaagcagagggagggcacaggggagagtcacagcgagattactaggaagtgtgggggaatgcccattcgtggtttgtgatcataagtgcattgagagtggagtgctgggaggctgctttcttgagtttctttccctcgacagcagcatttgcatgctgggtgcaggtgctgaaaacagtgattgagatggaggggaagggagcagggagatgaggtatctgcaagagggcttttctcatgtcaggctttgggatctaagctggtgaagggaggcagtgcagcccagagggtcttgttatgcagagagagagtgctggaggccaatgcttgcaggtgtcaagagggcagagaattgtgtgtgggggtggtatttgaacaagtgagcaagaaggatggaggctgaggctagagggttagaggagataactgtttctggtgacggtgaagttcaggtaatgaccatgataatgttagatagaaggaaagaaagggttttcggagaagagaggatcaaggacttgagaggggccgagcttggctgggacatccacatgcacagatgtcattggggaggacgacaggagttgggtagaatggaagtctgcagaccagaagcagatgtcctcaataaatgagggaagtgaccaggaagtctgtagctgatagtaacaaggtgaaggacaggctattatggctggaaaggccaggcctcaaaggtatgggggcttttgtaagacggatggggctaacagaggtactgaagtgcaggtgacattggggagggaggaaggacacatatctggtctgtctggccctgaagcacatggcatgggaggagaaatagcatctgcttgatgtggtgtccccagggcacacccaggtctcagagctagaaggtagaggaacattcttagaagaggtggaggctctcgaagggtttgctggtgtgcctgaggttgcagggaccaggtgggttagccatttcaggagatggatgcagttctgttgggttgagagccctagtcataggaaagagtggggacacctgcacttctggtggtgactgttcaggacagatgttcagcagtgtgctccccttaagaggagggtggtcctgttctagcaccgtagttcccaaacgtggctggggaggtggcagcttccttgtgtgatcctctcagccttcacatactgacacagcagggaagagaaggcaagactgtttctgttagagccgtttcgggagttgctggggagatttaggacagggacatcctgaaatgcccattggttatgcctctaaggcaaattacgctgtgttttgggtgatgaagaaagaagggtgtgaagggcttctgttgatgaaaatctgcctgtgcttgtttccaggtggagtatgcctttggtacgcgttttccacgtgtccctctccactgccctgagacgtaggcagggcagatattgtcagtgagtgggagtgacttgcctaatcctctagtgagtcagtggctgaaggaggactcaaagccaggccccttcattcctcaggacaagggggactgcgtctgagcaaaaagtatcttgccttatctctttcttatggactggcagcttttcctactttaccatatatttggctctgaggccagtttctttctcaagactttctagagtattagagtgatatttatttatttattttgaggtaagttctcactgtcgcccaggctggagtgcagcggtgagatcacagctcactggagccttgacctccctgggctcagtggtcctcccacctcagcctcctgagtagctgggactacagacacatgccactacacccagctaatttttgtagagatgggttttgccacgttgcccaggctggtcttaaactcctgggctcaagcgatctgcttctttggcctcccaaaatgttgggattacaggcataagccactgtgcccaggctagaatgatatttaaaaagcagctaagtgcttactgagaacttcttttaataggtattccttcgtttaatcttcataacagtcctaaggatatagccctcctgtatttcattttatttttgagacgaagtctcgctctgtcacccaggctggagtgcagtggcgtgatcttggctcactgcagcctctgcctcccaggctcaagcaatcctcccacctcagcctccaaacccagctaattttttgtatttttggtagagatggggtttcaccatgttgcccaggatggtctcgaactcctgagctcaagcattccgcccgcctcagcctcctaaagtgctgggattataggcatgagccactgcgcctggcctgtcctatattttattttattatttatttattttttgatacagagtcttgctctgtcgcccaggctggagtgcaatggtgcgatctcggctcactgcaacctctgcctccagggttctagcgattctccctgcctaagcctccctgggagctgggattacagatgcacgccaccacgcccggctaatttttgtatttttagtagagatggggttttaccatgttggccaggttgggctcgaactcctgacctcaggtgatccacctgcctcagcctcccaaagtgctgagattacaagtgtgagccactgcgctagcctatttatttatttatttatttgagatagagtctcactctgttgctcaggctggagtgtagtggtgtgatctcggctcactgcaagctctgccttctgggttcaagcaattctccctgcctcagcctcttgaatagcttggattacaggcacccaccatcacacccagctaatttttgtgtttttagtagagacggggtttcaccatgttggccaggctggtctggaactcctgacctcaagtgatccatccacctccgcccctcaaagtgctgggattacaggcgtgagccaccacacctggccttgtcctgtattttgtagatcagactgaggacaagaaatgttaactaaagctgttagcttcttaatggcagaattcaagtcaagggtttgttttcctgtcccacaactgtagttggtatataactactttttaaaaattctggtaaaatgtacataagataaaattcaacattttacctattttcaggggtacagttcagtgacattaagcatgtttactttgttgtgcagccatcaccaccatccatctccagaacttcctcatcccaaactgaacctctgcacccattaaacactgactccccactcccctcttcccccaccccctggcagccgccattctatcctgctttctgtctcccattgtgattgttttgggtacctcatatcagtggaatcatagtatttgtgcttttgtgtcttgcttatttcacttagtataacgtctttaagggtgatccatgttatagcatgtgtcagcttccttcctttgtaaggctgaatattctacatttacaccacatctgatttatctgtttatctattgatggacatttgggttgtttccgcctcttggttattgtgaataatgctgatgtgaacatgggtgtataaatatctgttcaagtccttgctttcagttcttttgtatatacagccacgcatcacttaatgacacctatgttctgagaaatgcttttaagcaatgtcagtgttttgcaaacgtcggggtatacttacacaagcctagatggtgtagcttactactcacctagcccgtacggtacagccttttgctcatgggctgcaaatctgcacgtcatgttactgtaccgaataccgtgggcagttgtaacacaatggggaagtatttgtgtaaacatatcgaaacgtaggaaaggcccagtaacagtacagtactataatcttatgggaccaccgttgtattatgtggtctgtcattgactgaaacttctttatttggtgcatgactgtataacaactatttttgttgtatattttctctcaggtctttgttttagagcttgtgctctgtgttgcctgcctatgcatttttctccctctttagtgagctttctgacccatagatctgtgtccttgaaataagtttcaacatttcacatcatacttgaagctcttccccaccccactctaatccactcatagagcacagaccatgtagtggctcagagtatggactgctagggctccagtcccagccctgccatccgctagttaagtgaccctggacaaatcatacaaactctgtttgagtgtatgcaatatactagagatgctatagaagtagaagtagaagtagtagtagaatctgtttaagtctctaaataggttttatttgaataaataattcaggatagggacatgtatgctaattccaaatttgccttcagctgttaggagtccagtagctctaatgtctccacggctgcctcttcaggtagcaggaacttcagagtgaatctgtataaatgtgtaaccatctgtaaggctagcagaatcccagattccatgggtgggtggaggaggactttatttcagaaatatattaaaataagcttccaatttcctcccaccatttattgttgctttatagttcaggaaagttatcagataaatgaattaatgtttcagagcttactcgtctgcacagtggctcatgcctgtaatcccaacactttgggaggctgaggcaggagagtcacttgaggctaggagtttgagaccagcctggacaacatagtctctacaaaatttttattttattttttgagatggagtcttgctctgtcgcctgggctggagtgcagtggcgcgatctcggctcactgcaacctccacctcccgggttcaagcgattatcctgcctcagcctcccaagtagctgggactacaggtgtgtgccactacgcccagctaatttttatatttttagtagagacgcagtttcactatgttggttggccaggatggtctcaatctcttgacctcgtgatctgcccaccttggcctcccaaagtgctgggattacaggcgtgagccactgtgccctgccaaaattttttttaaattaggtgggcgtggtggtgtgtgcctgtagtcccagttacttgggaagctgaggtgggagggttgctcgagtcccaaaggttgaggctgtagtgagtcatgatcacgccactgtactccagtctgggcgacagaatgagaccttgtcttaaaaaagaaaataaataaataaaaagcttaccagttaccatttatccttttgaggcctcacaacccaggtggagaacaccagctctggtgttttatctaccaaatattgagcgtccaccaagtaccaggcacgctgggcacacaaagatgaatgggcttgaagtttggtgggacaaacagacctcatcttgggggaaatcacgactttccctaagtgaaatggtagacaatattgacaggcatgggggccccctgagactgggaggatgggctggccgggggatatctaggaaggtgaggaggaaatattgcagctgagtcttaaattataggtgatcctcctccatcaggaggaagggcagtcctggcagtaggaatagcatgtgcacagaggtacagaccagaagcagcctcctgcttacaggaagggactccaaagccttctagtttttgttttagttaacttcatttgtttttgttaatttagtttttctttttttggagggggcgcgtgggaagggacaggtaaagaggtatccattagggaatagaaatatctaaaacaaatttccttaggcatacaggagggctaattagagttgttttgcatatctaatgtcagaaaaaagtcaaaaattgaaagataatttagatcacttaattcaactttctggtttttatagacatggaaagttgagtcataacgcgtatgagcatatgaacattttccattccctggtgctaattagaatagcagctacacaagggaaggggaacttgaccaaggaggtcgcttgactcaggccagggtctgggtatgagatcgggagggctgggcctatcatgtccgaagcagggtcagggagccaggcaaatgagtgaggcaggtggaagtaagactgcagcaggcttacgctggctttcacatagtgtatgtcccttccagaagcggcagctgctccacagcaccagctgagtgggacttaggaatgtcagacttcttgatttttttaagcgatgccaaaaatttggacttttatgtgaaatcgttctttaaaaaatgtaagtaactaaatgaatatatatatatatttttttccagatggagtctcgctgagtttgccaggttggagtgcagtggcgtgatctggggtcactgcaacttctgcctcctgggttcaagcgattctcctgcctcagcctcccaagtagctgggattacaggcacgagccaccatgcccagctaatttttgtatttttagtagagacggggtttcaccatgtgggccgggatggtcttgagctcctgaccttgtgatctgcccgccttagcctcccaaagtgctgggattacaggcatgagccactgcacctggcctaaatgaatttttaaaagcactatatgagcaaacaaagcatgtctgcaggccaccaaattttacaaattggcatctctgcttttgccacatggtgaaagctggtccacagcaaggaagagagacagagccagcatgtggcgagaatcacagggatggtctggcagctttcagggccctgtgtccagttgctcctgagtcccagccctatcctcggcctccttcctgtagcaatagtttttcgtttcgagtcagtgacatacattagtagtctgctagtaaatccccctttgtggtataaattaatttaccttacgtttgtttttagtggaaattttcaaacatatacgaaggtatagagaatagtacataatgcgctaccttgtcaccatcagtcaatgaatggctaatccgaccagatgccatggcttacacctgtaatcccagctactctggagttgggggcagagggcccaggacgggagtgtgtgtggggggtgttgcttgagcccaagatgttgagactgtagtgagccatgatcgtaccactgcactgcagcctaggtgacagagcaagaacctatcctaaaataaataattaagatccactcagtgttcagatttcctcaatttactttgttcaaattaggcaaaataaggagtatgtgtttaaaaaactttttttaaagcggaagaagaggccgaggcaagtttcagagcaggagtgaaagtttatcagaatgctttagaacaggaaggaaaggaaagaaaagaaggaaagtccaacttcattgttgccagtattaactctgtatcctacaataattctttgtttatatataaacaaacaattttttttaaacaaatgacattgtattatatgttttctgcacgtttctgatagaatttggatcattgccattttgtacctcctcctaaatggatacatctggacattgttcctggtcagtacatatagcacttctccattcttttcaatagctggataatctaaaatttggttgtaatttggtttgttccttccgtgggttcatcgtcttgctgacttacagaatgaacctgcagacctttgtggtgagtgttacagctcttaaacgtggtgtgtctggagtttgttcccaagatgtatccggagtttgttccttccggtgggttcatggtctcactgacttcaagaatgaagccgcaaaccttcgcagtgagtgttatagctctcaaaggtggcacaggctgaaagagtgaacagcagtaagatttattgtgaagagtgaaagaacaaagcttccacagcgtggaaggtgacctgagcaggttgctgctgctggctggggtggccagtttttattcccttatttggccacacccatgtcctgctgattggtccattttacagagtgctgattggtccattttagagagcactgattggtgcattttacagtgtgctgattggcacattttacaaacctctagccagccacagagcgctgattggtgcgttttacaatcctagctacagaggactgattggtgcattttacaatcctcttgtaagacagaaaagttctccaagtctccactcgacccaggaagtccagctggcttcacctctcactatcataatttatgcaagaattccccattgatggaaattttaaagattattatagcattctttgtagtgacaaaaaattattcttgtaattatatccttatacttttgtagaataaattcctggaagaggtttacattcatataattcttttagtagttgcttattttttcccaaaaggctgtggcagttaataatatcagtagtattcatttccccaaactcttgatgaacccaatctaatgttttatttacatttccttgactactagagaaattgggtttagcttcatatgtttgttatctgtgcccacttttctgtgaagtacttcttcattttttgcccgtttaaaaaaactaggttgtttgacttactgctttgcaggggctttttatatattagggatattactttgttttgtgttgcaaatattttctccttatctgtttgtctttcagttcttcttataattctcctttgcttttcaaattattttcccgttttttagctgttgaattaaacatttcttaccatattttgattccctgcatttttccattactgcttcctgttgggaacgcttgtttgaaaaaaataacaggaagttgaattttaactatactgttgagtttgagcttttgtaaagtcaaaagacaaaattatcacaaatgtagtttaaagatcttaactggctttatttgcagttctggtatcgggcagcatgtgattccataagattgtgttcgagtgagctgaggagaggaggctggctttgtggaaagaaaagggctgaaaaatgcagaaacatagaacccaaaataggtcgtttcaaagttactttctttgtaaggccggaacagggagacacaacaatggaaaataactggttaaaatcgggttagtttttgttgtaaggattaaaacaaaggaaaggtcatttctgtgattgtaggaaaatgtgaattttctgactcaggtgtgccctccaccttgaccagtctccccttggtgttctcccgaagcagagcccttccttctcccttgtttatttaatattcattatagttatggatttctggattcctaatttttcaggggtctgttttcaatactgttcttgtttttgtccctacattgtcccagctttaggattgccagactcaaatattatgattatggcctactaggtgaccttcagttcatactgtctggaggagtgctgaatgcagttattggcaggtgtgtaatgtttgactgtttgctgtgtgcttctgttgccgtaatactcaggacacagaattttaggagggggactgagagattaggtttcccctaggttttcagattctcatttgtgattttcatgacaaccctatgatactgcaaggtggcatttggacacgacttaccaacgcatttcctctttgctcaagcttaataaaagactgactatattggcctatgggactaacgctagtagaaaccacctcttcctcctaacatgtatggttttatgtactatgatttgctttcaaaatacattttacttctcaagtgaatatatgttctggtatttggttttatgctaagtggtagagagccctatctaatattagtgtttcatataacattacatagaaaaaccatttcccagtgctcttgccccactttcccgacaagtcatctaagtggacatccttagtttggagtgtcttgttattctgtatccttgttgattcagtgccttacaagctaagatgggctggaggacccgcctagcaatgactccctgttttctctagaatcaaagtttcttaagatggcactttaggcccatttatagacagagctatctttggagactcattacccaggcacttccccatcccataccttatgcttcaatattatgtgactcctgaacccactgtgatgtttcatgcctttgttgctttgcacatgctgtgtgttaagctggaatatgttctcactcccatctgctgaatggactattattaacctttggagcctccctgattcccttttcctggagttcattatgctttccattatatcttgtaccatctttatctttgcatgtgagaaattacattaaaatgctttatttatagaagtctttcattgggaagactgaattttctaaggggagaaacccaaaacttggcacaaagtagagcccaaatgttttttgaacaaacttcagtcaaacaacagagcttttgggtgagtagatagaaacatgttgaagggtgccatcttaactcaggctgccataacaaaataccatagactgggtggcttaaacaacaggaatttattttcccacagttctgaggctggaagtctgagacagggcaccagcatggttgggttctggtgagggctcccttcctgccttataagaagaggaagagatacctgagctgccttctcagtgtgtcctcacatggtggaaagagcccaggtctctcttccttctcttataagtgcacccattgaataggatcagggccctacccttatgatcttatggtttgcaagtggtccccgccccacagatgtagttctgaaattgttagtgaattcagtgggggaagtctaattgctttggggaaaatgaatgtctgtgcttcatgttagggacaaagtatacggatacctgcaatttacactgaaatatatcggaaaatgaggtgcactgatgggtagagagagggacgacagatgaatggatttgtgataaagcaaatggagcaaaatgttgattgtaaagtccaggcagtgagtgtatggattcacaggatggttgtttcaacttttcttagtgtttgaaactttttgggataaaatgttggggaagatacctgtatttttttaagaacacatttattggctaggcatttccattataggtattaaatcattaacgtgagcttcctaaacttaactgatttttttttccttcctgctctttctcctcctgtctttatctagtcagttccttcagctcttagttcatgcgatgtccctccaggaaatttcccctgaccttccagcctgatacagatatgtctttctgtgttcccagggcaccacttgcatacttctgccatagaatttattatcttgtactgtaatcatttacttactaatctgtctgaaccactagtctttgagttttttgagggcaaagactgtgttctggaatgtttttggtacaagaaaaaacaaacacaacagtggactctttgtggcttaaacagttagaagtttcttatctctaataccctgtgtcatcgcccgttgggtcttcctgcccactgcacagacaaaaccaattcactgagaccatggtattgcagtaaagagagttcagtggactcgaggctggccacatgggagaactggaattatcagtcaaatcagtctccctaaaggctcagagtttagagtttttcaaggatgttttggtaggcagggggttagggaatgggtgctgctggttggttggggatgcaactataggggtgtagaaaatggtgcttgtgcccttgagttcacctctggatggtggcgaggaaccacaggactggttgagtcataagtccatgtggggtcagtctgaaaaacatctcaaaagaccaatcttaggttctgcaatactgatgttatctataggagcaactggggtagtccacatcttgtgacctctgaccacatgactcctgagcagtaagggattataggaaggaggcctatattttagcagaactcaggcccctcccataattctaatctcctggccttttactagttttataaaggccgtttcagtccctgaacaaggaaaggatcaattttagggagggactattattatccttgttaaactagaaattcctctcagggttggtgtggcctatgcccaggaataagagaagacgccgacctgtaagaccagaggcaagatggagtcagcacgttcagcttctttcactgtcagaatctttgcaaaggcagtttcacccaaagtctggaggttgctgtttctaggattggttcagtgaggggcatgtggtcagcacctctaccttccctgttctttcccttaattatgccaagttgactgaagcagtgatacaggctggaaatatccaccatggttatttcagtttttgaactttaagcacagatattttgggaagtatcggggtgtgttgaatagttttcaattcatttattatttcttctagagaaattgacttgtttttgaaaacagcagttcagaattagataactacacgtgtttgcaaggatcccccccaacctggaaaaatatccttttcagacagccataataattcatagaaccaggattaattcagagaaattgtgtgacaggttgatggtctggaggttccaacctcattcacaaacctcagctctgtaggaaacagtgtggaccagaaatgaggccagaagtagtttcaccttcctaaactcaagccttttggggaggtctgcctcttattccatttattctattttagccacatttcagatgtgcttacttatctagttacttgcttagctcacttatttaaaaaaaaaaagtacgtaatttgcaaagggggagtggaaagaacgcctggtgtaggcaggcggtcaagagtaggggggagaagagcaaatgtgatctggactcctggcagccaaggcctttcactaactgatgagtgccctgaggtcgtcaagagaaagcttggttatgttcagtctgtgctgtttcagaagacagagaaatctaatacatgaaaagtaacttgcaacactacataaataatggcctcaaacaggttttaaatataggaaggtatagataaaattctggtatacacagttaatagtgagtatctctgggtggtaggatcataggtgctttttatgtgtattctgtaaatttgctatgagcatcgttacttttaaaatacttaaaaagtattttaagcattcagaatggttctttttcaactccatcaggtctttcaatgatgtcatttttttcacattttgcctttgtctttgttaaaattgatcaactaatactttttataatatttgcctgaagagtcctgcttgttactgccattgactctcatgaattgcgatttgcttgtgttttgtgagctggaattttaggctttagctgtgagactcccgaacactcattgccccttgttcccccagagaggtttcgtttagcattgcctgggcctccagcactatgagcagcctgggaccacttttcatgttactttattggctttagaggagtgttgtgggtataggttttcaggggagaattccctacagccagagcccagacaagcttccttgtcattttcctctgttggcgcacagatggtgtgctccttcaagggtcttgacttctcagttcccaattgaaaaggtgtctcaattctaactgctaccttgtgtgtatgtctggtctcccagccatgtgaatgtgtgtgtgtgcatgcgcacacatgcacatgtacgttaaatcctaaattaccaagaacagcaaccatccagaactgcaggaactgccgctcttactgctctgattctctcctgtttggggatccttactttcttttgagctcagctgtgcatttaagagcaattctaagccttggctgctcatgaggatcacctgggaatcttttagaatttcccatgcccaggttgcatctcagaccaattatttcagaatctagggtgggacccaggtgtaaggatgtttctgaagctccctgcatgattctgttgtatagctaagaatgggaaccactgatttaagatgatgttgttttatttcgcccagtgatgtgtgtgtgtgttgtgtgtgtttatttttctagtggggatgttttcaggctatctcgtcagcagtaagggaaataggagtccaccatgttgtagttagaatgaacactctcgtaaagtggcctcgttgtctggagtgacatccagagttcttggtctcatggccaaggaaatcaaggatgcagacacaccaagggtgaggtttagagcagaaattgaataggagaaagaaagagaacggttctctgccacagagagtagtcctggaaaaagggttgccatcctgcagtgaaatgcaggggtttttacagatgtgctagtggggaggcagtatctgatctacatagggtgtggaaaaccagttaggaccaagtgtgccatctgcataaggcatgactctctggcagcacccaccacagtcttttattatgcaggcgagtcctcagcctgagctactctatgttgcttatttctttcctattgcacatgtgctaaaaatgggggaggtggaaccaccatggtggacctgcctggccccaggtagcccttctattggtgcagccgctggcatgcagctgtgcaagcctccggcttccttatctatgtttgtaacctgatcttccaggctgctcttttttagaaaataattgatttcttgggctgtgttttgttagaagggaagttctggccaggtgcagtggctcacacctgtagtcccagcattttgggaggctgagcagggggtggatcacttgagatcaggagtttgagaccagcctggccaacatggtgaaaccccatctctactaaaaatacaaaaattaactaggcagggtggtgcgtgcctgtattcccagctactcaggaggctgaggcaggagaatcacttgaatccaggaggcagaggttgcagtgagccgagatcgttccattgcactccagcctgggtgacacagtgagactctgtctcaaaaaaaagaaaaaaaaaaaaggaggaagttctgccgaggactctttgccctcactatctgcctaaatggtctctttctacctcctgtatcactcttacaattagatgggatggaaaacaacattggttcattcctactgggtgctgggtctgtgccttggtgttttccatgtatatcctatttagtcctcagaacattcctgcaaggtaggtggtggttggttttatgcacataagaaaactggcttggagacattgaactagttctagggtcacgcagctcacaaatggcagaaccacactcatgcctgccagatgcccaagccctgccctttattcttgtgttttggtatatgtgaaatagatttttccatacaaattggttaaaataaagattggcacttgggttacggtagattccaggtccctgttaaatatacttacttgggatgctttgttgtcccataatactggagttgctctactcattttatcttccttctgattagggcaaattgattttgagatttctccttttaactctcatgtcatgaaggggtatttgttcttgaactcacttctttaatcaaccagagggatgtgtggggctgtgtaagagtgtgagagcatatgtgtgtgtgagaaagtgtatgagagcataagagtgcatgggagcatgtgcgagagcgtgtgtgttctgtgaacgtgttacagcatgtgagattgtgtgtggtgtgagcatgtgaacatgtatgtgtgtgagcatgtgtggtggcgtgaacatgtatgtgtgagagcatgtgaacacgcatgtgcatgttagagcctgtgagcctgtgatatgagcatgtgttagagcatgtgagtatgtggtgtgagcatgaacatgtatgtgtggtatgagcatgtgaacatgttagagcgtatgtgagtgtgtagttgtgtgtgtgtgtgaaagcgtgagtgcacctatgagaggacaagtgtgtgatagtgtatggagtgtgtgttgtgagagcatgtgagcttgtgagtgtacatgagcacaaatttgaaagtgttgtgagagcgttgtgaacgtgttatgaaagtgtgtatgtgggtgtgtgtgatagtgcgtgtgtgatagtgtgtgagcttgtgtgtgaatgtgagcatgtatgacagcgtgtgctagcatgtgtgagcctgtgatagtgtgtgagagcgtgtgagagcaagtgtgtgaatatgtgtgtttgaatgtgagaacatgagcatgtgtgaatgtgagaacatgagtgtgaaaatgagtgtgagcgtgtgtgtgaatgtgagttaatgtgagcgtgtgtgagcgagtgtgaatgtgtgaatgtgagtgaatgtgtgtgaataagagcatgtgtgaatgtgtgtgcgagtgtgtgagcatgtgtgaatgtgaatgtgagagcgtgagtgtgtgtgaatgtgagcgtgtgtgagtgtgagcatgtgtgtgaatgtgggcatgtgtgagtgtgttagtgaccgtttgtgagtgtgaatgtgagagcgtgtgtgagcgtgttgtgagtgtgtgcgtgttgtggggtagagggtaagagggcaaagcgaggagtaaagctaaagagctggggattgaggtcccaagctgttctccgcggcagccgagaaccgagcagagaggtaggaaactggagctacgagcggtttggtctctgcctcagtgaggccctgctgagggtctgatgatttttggtgactgggtgtcctctccaccctgcccagtgaggcgggcgtggggtgtgcgctcctgtttctcccctctagccttggcttcgccccagctgtgctggggtaagtgacttccagagttgttggagggctcgcatgtctgccctgagcctgaaaggattactttcctgttggaatgtctgggttagttaggctttaatggaggatgtgaatgacatttggttttagctaggttgaaagcaaatcgcctctaagtctttgtctttgtcatcagcagctcttcagtgggtcatctgtgtgtcacagcctcagaagaccagcgagatggctgccaacaagagtaagggccagagctccttggccctccacaaggtgatcatggttggcagcggaggcgttggcaagtcagccctgacgcttcagttcatgtatgacgaggtaagccctgctaggcacagaccaccttcctttggcattggccgtagcagtgtccctgctcccgctgtttctgtgccggtcctcccgtacacaggggttcacggagcaagtctgtgttgaggtggcttctgaatagcttcctaggaaggtctaatcagcataagatctggattgctgattctaggtaaataatttcaactccggcggggatgtgagagatctctgcttgcatcgtttccattgttatacttcgagctttctttctgacaaaagcccaggggaggagagaggagcctttgtacagattttccaaacaacacaagcatttagccttgtgattgtcagtcaatcgcgaagtgaaagagagtgaaaggggagctgagctgtcatacaacttaatcctttcgcaagtgatagacatcagatccagttctcccgtgcggcaaggtaaagcttgcactatccttgcccaaaatttacgtcacctacttaatgtggataacatcactggtgttgagttcagtgtgacaacacagccttgatccccggagctacaaaagtccctgcttgagctgtttgctaggatacttagcctactgtgggctctacatctgcagattcaagcaatgtagaatgaaacgttgcggaatgaaaatattcggggaaaaaacccaatgaaaaataacaatgcaatgataaaaacaatacaaattaaaacatgcaatgtaacaactgtttgcgtagcctttacattgtattatgtattataagtaatctagagatgatttaaagtgtacgggaggatgttacatgtaaatgctgtgccattttaagtaaaggacttgagcatctgcagattttggtatttggtgggggtcctggaaccatttctctagggataccgagggatgactgtagtacaggcagggagagtgttccgagcagagcttaaacctcagggcctctcacttgcattgcggccacatggctttatgagatttgcgaaagaaagctatcacaaccacgtcagttaagatcactacctcttttcactagactttcccattgtcctgcttcctcttatgctgggtgcagctggagtggccatgggcattttcggcctctagctgagggagtttgtgttgggctgggttaggtgggaatagtggtatgtgttggtgtggtttggagtcacgcggcatgtggcgattatcgctggctgcaggagtactccaaccgcccactgtgctgacgtgcgaacatcgtgatgtgaggtgcagggccaggggtggatcctgatgcgaacctgtcctgtggcacctgacacaagtgtgtgagagctagaagctagaaactgggccagaaaagtctttcagatcttacagcttgtacagtgaagctcaatagaggtttcctaaatttggcagtaatcccaaaactttcattactagaaatgccatgtagtcacatgcacatgtatgtttattgcagcactatttacaatagcaaagacatggaaccaacccaaatgcccatcaaagatagactggataaagaaaatgtggcacatatacaccatggaatactatgcagccataaaaaagaatgagttcatgtcctttgcagggacatcgatgaagctggaaaccatcactctcagcaaacacaggaacagaaaaccagacaccacatattctcactcataagtgggagttgaacaatgagaacgcatggacacagggaggggaacatcacatgctggggccttttggggggcggggggcaaggggagggagagcattaggacaaatacctaatgcatgtggggcttaaaacctagatgatgggtcgataggtgcagcaaaccaccatggcacatgtatacctacataacctgcatgttctgcacatgtatcccagaacttaaagtaaaaagaaaaaaaaaaaactcatgtagttgtgaagctgaaagaacctcttctaagctgtcagaacaaaagacattttcattaaccatgctaaaggaaagactaaattattttttattctctataggaatgtttcaaaatcattggcatatgacaagaaaaagtatacagcaaacaaaaaagtagaaggtattctagaggtatgtcaggcagtttaattaataaaaatattgttattttgctggattttgtgatgtcagtgctgtttgtattagttttttttattactgtataataatcacaaagttagcaggttaaaacaacatacatttgtcattccatagtttccatgggtccagaattggagcctcagctgagtcctctgctcagagtcccacaagactccactcaaggtgtcagctggggctgtgacctcttctgaggcgtgggggtcctcttccaggctccctaattgttggtagaatttagttccttgtgggtgtaggacacaggtgctcggattctacaagttgcccgcaggcccctgccatgtgccgtctccataggcagctcataccacagtggcttgcttctccaaggccggcaggacagtctccagccagcctagacggtcttataaaatgaaatggaaacatgggggtattcccttcgcctcactgagagtcacccgggggtgagatcgctggagtactcatctttaaaactttataatggattatgatttctcattcaatgtcaacatttactttaatgtccagtattacgtgtgtaattttgtatcttaaggaagggcccccataatgaataagcttcaaacccaaacctggttatcctcctgggtcatgctccccatgtcttataatgagacacttttgtgtttggtacctgcttttctttatcttattctggggggtcaaactggataaatctaatgtaatctgctgaatttccccaaaacgtttttgcataagagaagcaggttgggagatctgcatctgctttgtaggtcttttgtttgtttttgctcaaaaacttataatttgcttacgaaagcttttttctcccctataacagaggttggggaagagagggggtggtgagtaggggaattaggattagggagataggattagggaagtagttgttaacagaggtgagagagggggattttgcttccccagggaatattcgtaagtgcctggagacatttttggccatcacagcttgggggaagatgctaccagcatctagtgcgtggaggccaaggacgcactcagcatcctacatcacacaggacagccccgaacaaagtattagccagcacaaaatatccacaatgccactgttgagaaacctgcattagaggcagagccgtggcagatccaaggagagaagattcccctacagtgttagtgattgagaggccctgggttgccagttccaagagcaagttcagatacagagctggggccgggcgcggtggctcacgcctgtaatctcagcactttgggaggccgaggcgggcagatcacctgaggtcaggagttcaagaccagcctgaccaacatggagaaaacccatctctactaaaattacaaaattagcctggtgtggtggtgcatacctgtaatcccagctacttgggaggctgaggcaggagaatcgcttgaacctgggagatggaggttgcagtgagccaagatcgcaccattgcattccagcctggggaacaagagcgaaactccatctcaaaaaaaaaaagataacagagctagcactgctgaggagactaggagagcctggtctggaggtttctgggtgtgtgtgtgttggggaggggggcgggggtgggtaagaggagggggcagatgcatgcagaagattcgagagttttttctcttctttctgttctcttcacagagaccagggaaagctgtgcctggccttagtctgtttttctcatgggctaacatacttgagaactggaaagtggcagttattgaagaaattgtaaaataaaattggggcaaggaaggaatagaaatgaagtgatgtatgtttgggggaggagttctaatcgattttctaaaacggtgctaatagaaacttccatgatgatgaaaatgttctgtatctatactgtccaatacaagtggctattgtgcatttgaaatgtggctggtggctactatattggacagaatggttctagaatcataattttttagctcgaagagaccttagcagtaattgtcaaacctagctgattatagaatttcctgggagactttaaaaaaaaaaaacacctcctgaataatattggtggagttggagaactgggactctttcagtggtgctcttctggtggttctgccgcgtggccaggtgtggcagctcctgcctgagagatcatctagtcaggaaattgagctctgtgttcagggaggccggctgtctaaatcaagcttgtccaacctgtggctcaggatgactttgaatgtggcccaacacagatttgtagactttcttaaaacattcagagattctttttgcaatatatttttttagctcatcaggtatcgttagtgttagtgtattttatgcgtggcccaagacagtttttccgatgtggcccagggaagccgaaagattggacacccctggtctaaagtctcctgcaccattcagactctttgttcatagtgcatgcttaacccttatttaaaattgtttagcttatgtgatggaattttcatgaagattagattatggaaggagccatagtcccagagtctttattcttgtctaagttctgactttgagaaaaattggagggagctgccagggtggcagcagtcagattttaagctccttatgctcggcctaacatactcgtttttgccttttttgggagagtaaggttggggatggagaggctttggcagcaaccgtttcagactttcagtctctggcagcttagaggaaagtcagcttagaaagaaagggtccacgtgaagtttgtcttagactcttgggcatctgaaactgagccatgcagagctctgcaaggccagtaggggatacgtatggttcacgctaatggatacaaagactttgtgattttctgtttccagctgagcaatgtaaataaacatcagggttgtaatggaatgttggggtaatcagcatacttttcattgagtacagaggtatgtaggtacagcaggacattctgacttctgtgtcaaaggagccagtggaactctggctggctttatccttggaagctcagaaatatacagttgagataatttatggtagaattcagagattttcaggggacagtcgtgtgttggatttttttggcgtgtatttttctttttggaaaggagttaaaagaaggacacttgaaagcacaggcaagttttcacatctctatttggagataatttattagtacacgttgaagagaacctaatactaaacatgtcttaatatttttatttttgagtagctgttaactgacaatacaaggctctttttaacagtcttcctcaaataacctttaattcacttggacattttcaattccatttttaagttaaaaaaattttaaatcacagccttattaagatgtaatgcacatatgaaattcgctctttttaaagtgtacaatttttttttttgagatgtagtttttctcttgttgcctaggctggagtgcaatggcacgatcttggttcactgcaagcgccacttcccaggttcaagtgattctcctgcctcagcctcctgagtagctgggattacaggtgtgcaccaccatacctggctaatcttttgtatttttagtagagatgggttttcaccatgttagccaggctggtctcgaactcctgacctcaggtgatctgcctgccccggcctaaagtgtacaatttaataggttttttttgtatattcatacagatgtgcaaccatcaccattatctaattttagatcactttcatcactccaaaaaaaaccaactacgtattagtagtcattccccgttattgcttccccgtcccacccctggcctctggcaactgctttctgcttctatggatttgcctattctggacatttcatatagatggaatcatacaatatgtggcctttatgtctaacttctttcactcagcatcatgttttgaaagttgttccatgttgcagcgtgcgttggtactacttcattcctttctcaaaaacccacaccactgaaagcctcttggtacactgtgttagttcattctcttgatgctgtgaagaaatacccaagactgggtagtttataaagaaaagaggtgtatagcctcttttcttccacagggctggggaggcctcaggaaacttacaatcatggcagaagggggagcaaacatgtccttcacaaggcgccaggaagaagtgcagagcgaagtggggaaaagccccttatgaaaccatcaggtcctgtgagaacgaactcactatcacaagaacagcataggggtaccgcccccatgatctcattgtctcccataaggtcacttccccaacacattgggatgataattcggattacaacctaaatgatgagatttgggtggggatgcagaaccagaccatatcatacatcttgccaaattacttttcagatgaattttatacttccgttatgaataagaactccagttttttgatatacctaatgttaaatgacgagttaatgggtgcagcacaccaacatgacacgtgtatacatgtgtaacaaacctgcacattgtgcatatgtaccctaaaacttaaagtataattaaaaaagaattccagtttctcacccttgcaggtgtttgcattaaaattttatactgacaataatattgccaagtgttctgctctgtgcctggtttcctcatctgtaaattgggatatctgcctgtattgtttaaaaacaaaaaatggcaaaacagagctataaagaacagaagtgttacgtaaaatgttgcttctgtagtgtcctgttcatagtgtgaagtgcccatatgtggaattttgttttttggcagattttgttccccttaagactttgttaattaccgataatgtttatttcctcagtttgtagaagactatgaacctaccaaagctgacagttatagaaagaaagtggttcttgatggggaagaagttcagatagatattctggacaccgctgggcaagaggactacgcagccattcgagataactactttcggagtggggaagggtttcttcttgtgttctcaatcacagaacatgaatcctttacagcaactgccgaattcaggtatgtctgaaatgaaatagcagaagcccccaggaagctttttgccttttctcatatgtcttaggcctatgaagaatttggggctgagcatactaggagagggctgagcttgttctcaggaataattctgtctaaagaatcttctggggctttctgaatcttggcacattatagactatgatgattataatctctttgggctttcctgatctgtgatttctgaataaaataattttaagagtcttactgtccccgaaaacaatgaagctattccatataatcaagaacatataattttgttcctataaatactcagagattttcattgataaattaaccatctatcctttaaataatgttactaaaaaaagtagcaggtttagtctgtgttgaaggttatgaaacaatgactggaaagtgaaagatgggagtcaaaatgaccatttgctgctacttaaggactttcagcacagtggagggacgagaacgcggctttagagtcaggagacctggtttgaatccctgccttgccgctcactgaccatgggcaagtttacttagtgtcaggattttgtttctttctctggaaatgcacttgtgagttgagaaatgaaatgaaaggatgtattagactgtgaatttcatgtgggcaagaacctggctaccctccattgtcccctgtcacagtgtagacacatggtgcttccatagtgagtagaatatccattgttatttattttaaaatatggcaactattctccatgaaggtgttagagaagaaagaaaaagaaaatacagcagtgaaaaaaataccttcagttcattttgttataaagaaatagccttttgggcataattcttatgctctataaatgtctctttaccccatgcccttcccatttctcctacataattgagttttaaaaaatctgttcttcttataaacatatctatctagatgactttttaagaagcagatctagagtttagtagggaactgaagagaaaaaacccaaaaatcaaatcagtttttttcattcttcagcaagttctggtctgacagtaaggtggtcaaccagaggtgaaaaggagaaagctagctatccttccaggacttggatggaagcatcactgagccagggaggcctcgggtgagcacaggtcacccagcagggctagtgaaagataatagggaggtgcctcagtgatgcttcatagctccaggcttcagagtcgaagacctacttttctggaagcagagtgcgtgtggtgcagtgactagttaagtgactatgactcattatgagaagttctgttaatttttagacatttcagaccttcctaagggctgctctgtttgaatgtagcccatgtatttataattgtttgcatctgcgtagtcctgtttttaatgcctcatagagggtaaaacaggacagatgcacacactctcttcttttcttccctgtcccgagccttttgatttcctgttgttctgtgacttacttagaagggaagtgggcaggagagttctctgcagaggatatggagaaatacaggtatttcaagtgctccttgtcctctcctcagtcaccacacatgcacagatagcactcgggcgttctcacagagttggagcagggctcccctcaatgtggaaaagggttttggttgttaggtggaaagagagatccttagaagaaaaaggacagatgaatacctaaaaccagaaagaaggggaagttgacctctgcgtaggtttctcatgttgttgggaacagaagaatgcaggtcaattatctgagccctgtggctaaactcaagtcactttacttcatgtctgttagcagttttaaaacagcatttgtgtactatcttccaaatagaaaggccccaatataaaatgacatgtgaatatgctgtcttccttgaaactttttctggaaaatattttatgaactaagataagttctgtcataagagaccagaacttggtactcccatttttggatcgatatgtttatcaatgaggtaattttgtgtgcccctgcaagactaatgagccagaaagctatcagtttttattgttcatagtttataatgatcacatgacttcaaatgtatcatgttctttgaccccagttcaaatgtaggctataacaaggctacacaaagccaatttcaagcatcttttcatcttttttagtttgtcttaaaatatttgatgtctggcacttaaattgactacatgaaaattttagtttttttttttgtttttttttttgtagatacaaggtctccctatgttgcccaggctggtcttgaactcctgggctcaagtgttcctccctcctcaggctcccagagtgctggcattacagatgtgagccaccacgcctagaaaatatttttattattgtgaaatgttaccctataccatataaaaatcaatacagatctctacaaaatacatttttgaaggggactctttttagaatgtattggcatataaaagtagaaatattctcatgggaccaaaataatggaaatggggtatttaatttttttaaatatttagttttgattagtactttcagatagctgataatttttagtagacgtaaaatttaatatgctacgagtaatggtatttttgtagaagacacttttgaagtacttttccatagggcttgtcgtatttcctttcatttttttcactttgtagtagaaaaatggtacgtattggaatgtgattactgcctaacatatctgtctcgattctgtggcctataacattactgtgtctgcatggaaactggggatgggatgacatacttgtcgtgtacacatgcagatctaatcaaaactgaagtttcaaaacaatacaatattcacctttcctacttgagattcccttggatatttctgatctggtcagttctgttctataatctatttcactgcaggggggagaaactgctggttgcgacccactagattggttttgtgatccactaataggctgccaccttccatatagaaaacactggatttcatagcttttatgtcacaaacaaatattttcaggggaattaagcattttatggagatagttcccttagcttgtttttattgcagagattgaccatttttcttctttttgtttttttttttgtgtgtgcataagttggggaccctgttgtgacgtaaaatcctgggctcctatccagacacttacttctgtaagactgagcccagaaatctgcatttgtgatgagcatcccaggggattctgatgtgggcaaactgagaagcagacttggaaaacacttgtcttgctcatgactgcctctagggagtgctttctcagaacatgccctaaatctagtgatttttttttttccttctgccttaggaaagccttttattttagatgggttcacaaaaccagggttcgttctttagtttttttagctgctgtatttttggtgtaacaccttagggaacagattctccgtgtgaaggctgaagaagataaaattccactgctcgtcgtgggaaacaagtctgacctagaggagcggaggcaggtgcctgtggaggaggccaggagtaaagccgaagagtggggcgtgcagtacgtggagacgtcagcgaagacccgggccaacgtggacaaggtaggcgtgaattctgtgtatttctcagaaacagacctgagaaacagcagaatggaggcatctcatctgctgggttttagggaaccatttatgaaaactaggtgaagattctgattcctatgaatgtctaagccattatcatgattataatgagaaacattgagaggatgtcaccttgtatttcagacaactcacagaaccttttactttgtcatgaggcttcattagagtatgcttaatgtgttcttttgggtttttcttttttgagacaaagtctcactgtgacaccaggctggagtggtgtgatctcagttcactgcaacctctgcctcctgggctcaagcaatcctcctacctcagcctcccaagtagctgggactacaggtgtgcaccaccacactggctgttttttgtggagatggggtttcaccatgttgcccagggtggtctcaaattcctgggctcaagtgatctgcctgcctcagcctcccaaagtgctgggattacaggtgtgagccaccacacccggcggactatgcttactgttggtgtggtcctgggaaggatggtgggacgaggccattggtttgtgaaggctgggctggagggatggacgtcattagcttctgtgtgtgctctcaccttccacagccttgctcttcaggagcagggtgggcgggcctggctgcttctaggaggttcccctggaggtgcccttgaaagatacgtggagcttcttgattttgctctcattgagttattggtcagatttgttcttttcaccttactgttcactgacagagccacagtgttccatctttgtagtgtagtctctaaatagtatttgctctcagaactcaaatctctgggatctcttttttttttttatctcttatcccatcccagcatactttctcattcaaatctctgaagctaataaaagggtgaccttgagtgacaatgatgaatgctgacaatttgaaaatccacctatcagggattgctattgttaggccttttttctttttaaaattaaagttcaaggtggttgccacacagctaaaattttaacgctgtgccttaaagatgaggctttctgccttgacctcattcactagctctcactgcatatccatgtgcttgtagaatctaagcacatagcactttggcagccacacagtggacacgtctgctttttgttctgcagcatcagcatctgaatcccctatatcctgtcttctgtttctctttcttgtgcagaaacattcccctttgctttcattacctgacaagggagagatttttatccaagctttattttcacttgaagtgatgctagaagaacattggtatttagaatgttggtattagaaggggtttgctttagacgcacttcggcaagatacatctatttgtatgtatcgtacataaaaacatgtatcttaggagacatatacatataggatagatatacatataggatacatatattgtacaacctaagtccgtttagttgtaatctgcaatgggaagcgcgtgttccgccgtcagcttttctttatattgtcatctctcaactcttacactcttatattattgtgctacttaaaatatttttattaaattattttccagctgtggaaaccacacaggaaatccagaaatatggctcattttaaaaaaatcagggagactctctcagcttggaactgtggatgtgtatttcctggatgggttgtcgcgtggggggtctgtgttgtcatctccccttgtctgctggaccagcttgacctgccaaacaggaaccagcagagacttatgactggcagcattgtattcacttgtaaagaatttctatgaaaggtgtgataagatcagcccatgaacaactttgtcatcattttaagttggatgcactccattcccctcctcttgtcttttgctgttaggacaaaaagacaaacctgtagcatttgaaactgttcactgttgctgtcttgggcagtgctttcctgagaggctggcaagaagggatgtttgggttggcctgatctagctgggggctggggttgggggtgcttttctgtgcctggagctagtggtaaatgcatgtggagccccacactccagaggcttgatcttgcttttcaccaagaagaaggtgtggccatgaaggagcttgtggttttgtgtgaatgtctgaagataagggctgtgctcagtcccacacttgcagtctctgtcattctctatgagaaatctcaaatgtctcttcgtaggattcatattttgtctgcttgggtataatcagtcctctggcatgatggctggtagcagagggcaaaacccaaactactgtgacaaaaggataatccatatctaagtaacacactgaccttcaaaggacaagtctcatcagttcttgataaagttcctctcagctgacatcacaagggtcggaggagtggttgtcctgagattgagggtgggggagtgtgtgtggggagggatagggtggccagaaggacatctctcatcctccatcttctcagtcgcctagtgcaggagctttagttgttgatgctttacgccctccttctcccatcctactgcctccccagggtggctgttgtggagttagctgggaaagctgtcatgcataatgatgttccaacctccatggggtccttgtaaggattaaatcagatgcaggggtgtcaagagcacctgggagcagggactcattatggcattcttcccttccctggtggttggaaatgctagaaagtctgcttgctgttattactctcaatatttgtaaattttataaatgtatagatctgttatatgcaaaaatatgtcttacccttcatcacacttattgtaagattttatcattttgaaagcagctgttaggccgggtgcagtggctgacgcctgtaatccgagcacttggaaggctgaggtgggcattgcttgagctcaggagttcaagacccgcctgggcaatatggggagaccctgtctgaatttaaaaaaaaaaaaagctgctgctgcatggcagtgacagtacgatgattctgtccttggcttgagcagttgtgtgatacgagcagttgtatgagagatgtttgctttgtataattagaattttttaaggttaatttttcttatttgccccagagctattgtttctgttgacatatggtttataaaaatcagtttgactttgtgctttaaaatgtaactacatatcctgcttagtcaaattatttcattgaatccttaaatgctgtgttcacagtgtcaggttaacaaaagaaaaaaatcattaaatggctctttcttcactattctttttactctttactcctcacccccaggtgttctttgacctaatgagagaaatcagaacaaagaagatgtcagaaaacaaagacaagaatggcaagaaaagcagcaagaacaagaaaagttttaaagaaagatgttgcttactatgagtgtcaaggtgacggatgaagccagctgctcctaaggacacagggctgggttggtaaagagaaggctatggttgacttcttgcttgtgcttcccactctccccgacttcattcactcaaacttctttaaatggggaaaaatatttgtgactctgtggctggcagaagaaataagcccatgcaagtggaagggctgctttgtcaggaggttgtggaatttctttcttctccccttcttccctcccaaaagcttagctatgtataaagtgccacagataggaaacagctgttaattacaaagagaaagaattgtcatagcatcttattttgttcctagttttataacattaccatccttcgttttgaactacagatgttgtagtgggttttggaggagggagtggagtaagatgccctcccacttttatcagtttagtagtagtactgagaaaaatcccttcagctctaagaacactgaaaaatccaccgattttttgggtaagcttcttggcaataccctgtggatctgaaacagctaaaaaaatgaatttgaattgcgccagataggtcaataccaagcttctgattcctcctcacatatgaaaagtgaaagttgtgagttgttttcctcttatttaaacattggcctattataatctgtgttggttatttttctcctgtaagcatcctgatttttctgtaggaacttttctttggcagaccaagtgaagactcaggaatggtgtgcattataaatgacacacattgccacttgtgtagatatttttaagttctttggctaagtcctctcctaactgcctgtcctctggttaggcccctccctctccactagtggtgaatgcatgtgtctgtctgatcagcatcactgcacacggaggtctagtgagcctcttgctaagtgtcacacacactcttcccaaagacgtgatgagttaaagttgtattctgaaatcatgaagccagagcctgtgccagaccttctgctacctctcatagaattgctctgtaattctaaatttaaaattagaagtagagagagataagccatcgcccctttgcctctgagaattggctgctgtttctaatataattattttctaagatagccagatagttagaaaaagattttcattgatgacatatctttaaactttcttgcatcagtattctaaattgagcaaactgaaagattttcatcaggaaaggagcactgtgggaagagcccagtattcacattttttccccatttttcagaagcgacatttcatatataggtgccaaaagtgaatcggggtgcggagagtgggaaccttttgaatttatgattgtcacagagatggtagaaattatgatctgactggaaaacaatcctgtatcccctcccaaagaatcatgggctttttttttgaataaaaaagcagacaaatagac

SEQ ID NO: 190 - DNA, 2230 bp, Homo Sapiens
atgacaaatcggtggaggacggctggggtccggccccgggagggggcggggcgcgtttaagagctgcgggccgggtgcggacggcggaggcggcgggactggtccctgcagctcttcagtgggtcatctgtgtgtcacagcctcagaagaccagcgagatggctgccaacaagagtaagggccagagctccttggccctccacaaggtgatcatggttggcagcggaggcgttggcaagtcagccctgacgcttcagttcatgtatgacgagtttgtagaagactatgaacctaccaaagctgacagttatagaaagaaagtggttcttgatggggaagaagttcagatagatattctggacaccgctgggcaagaggactacgcagccattcgagataactactttcggagtggggaagggtttcttcttgtgttctcaatcacagaacatgaatcctttacagcaactgccgaattcagggaacagattctccgtgtgaaggctgaagaagataaaattccactgctcgtcgtgggaaacaagtctgacctagaggagcggaggcaggtgcctgtggaggaggccaggagtaaagccgaagagtggggcgtgcagtacgtggagacgtcagcgaagacccgggccaacgtggacaaggtgttctttgacctaatgagagaaatcagaacaaagaagatgtcagaaaacaaagacaagaatggcaagaaaagcagcaagaacaagaaaagttttaaagaaagatgttgcttactatgagtgtcaaggtgacggatgaagccagctgctcctaaggacacagggctgggttggtaaagagaaggctatggttgacttcttgcttgtgcttcccactctccccgacttcattcactcaaacttctttaaatggggaaaaatatttgtgactctgtggctggcagaagaaataagcccatgcaagtggaagggctgctttgtcaggaggttgtggaatttctttcttctccccttcttccctcccaaaagcttagctatgtataaagtgccacagataggaaacagctgttaattacaaagagaaagaattgtcatagcatcttattttgttcctagttttataacattaccatccttcgttttgaactacagatgttgtagtgggttttggaggagggagtggagtaagatgccctcccacttttatcagtttagtagtagtactgagaaaaatcccttcagctctaagaacactgaaaaatccaccgattttttgggtaagcttcttggcaataccctgtggatctgaaacagctaaaaaaatgaatttgaattgcgccagataggtcaataccaagcttctgattcctcctcacatatgaaaagtgaaagttgtgagttgttttcctcttatttaaacattggcctattataatctgtgttggttatttttctcctgtaagcatcctgatttttctgtaggaacttttctttggcagaccaagtgaagactcaggaatggtgtgcattataaatgacacacattgccacttgtgtagatatttttaagttctttggctaagtcctctcctaactgcctgtcctctggttaggcccctccctctccactagtggtgaatgcatgtgtctgtctgatcagcatcactgcacacggaggtctagtgagcctcttgctaagtgtcacacacactcttcccaaagacgtgatgagttaaagttgtattctgaaatcatgaagccagagcctgtgccagaccttctgctacctctcatagaattgctctgtaattctaaatttaaaattagaagtagagagagataagccatcgcccctttgcctctgagaattggctgctgtttctaatataattattttctaagatagccagatagttagaaaaagattttcattgatgacatatctttaaactttcttgcatcagtattctaaattgagcaaactgaaagattttcatcaggaaaggagcactgtgggaagagcccagtattcacattttttccccatttttcagaagcgacatttcatatataggtgccaaaagtgaatcggggtgcggagagtgggaaccttttgaatttatgattgtcacagagatggtagaaattatgatctgactggaaaacaatcctgtatcccctcccaaagaatcatgggctttttttttgaataaaaaagcagacaaatagac

SEQ ID NO: 191 - protein, 206 aa, Homo Sapiens
MAANKSKGQSSLALHKVIMVGSGGVGKSALTLQFMYDEFVEDYEPTKADSYRKKVVLDGEEVQIDILDTAGQEDYAAIRDNYFRSGEGFLLVFSITEHESFTATAEFREQILRVKAEEDKIPLLVVGNKSDLEERRQVPVEEARSKAEEWGVQYVETSAKTRANVDKVFFDLMREIRTKKMSENKDKNGKKSSKNKKSFKERCCLL

SEQ ID NO: 192 - DNA, 2243 bp, Homo Sapiens
cgagcccggctgctcaatgacaaatcggtggaggacggctggggtccggccccgggagggggcggggcgcgtttaagagctgcgggccgggtgcggacggcggaggcggcgggactggtccctgctcttcagtgggtcatctgtgtgtcacagcctcagaagaccagcgagatggctgccaacaagagtaagggccagagctccttggccctccacaaggtgatcatggttggcagcggaggcgttggcaagtcagccctgacgcttcagttcatgtatgacgagtttgtagaagactatgaacctaccaaagctgacagttatagaaagaaagtggttcttgatggggaagaagttcagatagatattctggacaccgctgggcaagaggactacgcagccattcgagataactactttcggagtggggaagggtttcttcttgtgttctcaatcacagaacatgaatcctttacagcaactgccgaattcagggaacagattctccgtgtgaaggctgaagaagataaaattccactgctcgtcgtgggaaacaagtctgacctagaggagcggaggcaggtgcctgtggaggaggccaggagtaaagccgaagagtggggcgtgcagtacgtggagacgtcagcgaagacccgggccaacgtggacaaggtgttctttgacctaatgagagaaatcagaacaaagaagatgtcagaaaacaaagacaagaatggcaagaaaagcagcaagaacaagaaaagttttaaagaaagatgttgcttactatgagtgtcaaggtgacggatgaagccagctgctcctaaggacacagggctgggttggtaaagagaaggctatggttgacttcttgcttgtgcttcccactctccccgacttcattcactcaaacttctttaaatggggaaaaatatttgtgactctgtggctggcagaagaaataagcccatgcaagtggaagggctgctttgtcaggaggttgtggaatttctttcttctccccttcttccctcccaaaagcttagctatgtataaagtgccacagataggaaacagctgttaattacaaagagaaagaattgtcatagcatcttattttgttcctagttttataacattaccatccttcgttttgaactacagatgttgtagtgggttttggaggagggagtggagtaagatgccctcccacttttatcagtttagtagtagtactgagaaaaatcccttcagctctaagaacactgaaaaatccaccgattttttgggtaagcttcttggcaataccctgtggatctgaaacagctaaaaaaatgaatttgaattgcgccagataggtcaataccaagcttctgattcctcctcacatatgaaaagtgaaagttgtgagttgttttcctcttatttaaacattggcctattataatctgtgttggttatttttctcctgtaagcatcctgatttttctgtaggaacttttctttggcagaccaagtgaagactcaggaatggtgtgcattataaatgacacacattgccacttgtgtagatatttttaagttctttggctaagtcctctcctaactgcctgtcctctggttaggcccctccctctccactagtggtgaatgcatgtgtctgtctgatcagcatcactgcacacggaggtctagtgagcctcttgctaagtgtcacacacactcttcccaaagacgtgatgagttaaagttgtattctgaaatcatgaagccagagcctgtgccagaccttctgctacctctcatagaattgctctgtaattctaaatttaaaattagaagtagagagagataagccatcgcccctttgcctctgagaattggctgctgtttctaatataattattttctaagatagccagatagttagaaaaagattttcattgatgacatatctttaaactttcttgcatcagtattctaaattgagcaaactgaaagattttcatcaggaaaggagcactgtgggaagagcccagtattcacattttttccccatttttcagaagcgacatttcatatataggtgccaaaagtgaatcggggtgcggagagtgggaaccttttgaatttatgattgtcacagagatggtagaaattatgatctgactggaaaacaatcctgtatcccctcccaaagaatcatgggctttttttttgaataaaaaagcagacaaatagac

SEQ ID NO: 193 - protein, 206 aa, Homo Sapiens; identical to SEQ ID NO: 191

SEQ ID NO: 194 - DNA, 716624 bp, Mus Musculus
  misc_feature (1)...(716624): n = A,T,C or G
ttccgccaattccgagagcgacggggcgtctgtgacatgcgatcgcttgccaagtgacggtccccgagtgtgaagtgcccgcgaggaagtgtgagctccgacgcgggcggcaaggggatgacagccatgaagcaggagcagcaacccaccccaggggccagggcaacccagtcgcagccagccgaccaggtgagagttggcctctagggactatccctccagggaggggtggctccaatcagtgtccccccccccccacacacacacacattagtccctcaggatccgctcccacgtttgcctctcttcatcttccctccgcccgactcccaggctctcttgtctcatccatggacccagcaggaacttagagcagcctagtgcgctctggcgtcagaatgctcaaggtggagagccgtggggaagcgggcagagaggtaaaggctggagatgtgccaaggcagataggctgctgtgggatggaggggtgatctgttctaccgtggggagtcttgacttctgctgaacgcatttggaatggatctagcgctgtcctggagactggctcttgaacaggtccagccttgtctcactggctcagacgcgcgctggctggagatactgaagtaggcaaacgacctttaagctattagagtttcccttctgttttcttttgagaggatcatgatggaaaagcagggtgggaaaagaggacttctctagtctgccgggtgaaactgagcatgagggaataaaaggcgtttatcattcagaatggcaaggaaggtctggctttggtggtttgttgggtctagatgtgtagcgtctgctgaactaaggtgccctgcagaactaaggtgccctgtattggctgattggttattactgtcccctttgcgtcctttgatacctgccaccctttttgggttggtgttgtttgggtctttagacaatctgtagcctaatgttatggagaaatgtctgtttcctgggtctggtttgggggagatttgagagttgagtcacgctttttctaaagttggagggatcaggagcgaggcgaagctctctcaaggaggacggaggctgtagaatctgcctgagatgcgatcatatttacatcaattacaactggactaagagggccattcttggtcagcgcaatgctatggagctagatgatcccgcagcgagatgcaggaggtggagcgccaagctctttgcccaaggagcgcactgtcggtggaaggctgctagaggcgttttaagcatagacactcagctcacagttagaagtgcagtgactgggctgggggaccatacaaggcaagtagaccccagctcttcagctcttggtattctaaacactgtagccttggaggagctgtccaaattgcccagagcgatgctgaagcagaggaagggatgccaggaatgttgttattaatattccagtcttggtcatctcccctggcttgtggtctctttcctccctctcctatcccatcccatctccctgcacatgtgtttcacacaggtggaaaatttcagtgctttacagctctctctgtttagtgaggtaaaaattgcagtttatgaagcgtctgcagccttaaaccacccattcttcgcccttagataagaaggcaaagattaaaatattatttattccacaatgtcccctcttcttatacctcttctttgcccccctcccccatcagcacacatcaccatgtagagactggttggcagacttattgaaaaatatttcaggagaggaacacggatgtaatcttcccttttaaggctgaagtccttaaattttatccacaaggcttggactctcgactgctccaggagggatgtaaccgataagaatgattagccaggagagagtctacacatgaaatttttgctcactaacctgtgacaccagctggtaacttgaggtgctgcagacagcttctggaagggtgggggaggtttgcaagaggcaaggcagatatacagaggcacactatatatatgcgtggcaaatccctttgtcaggattaacctgacacttaaaattcacatggtaagagaggttcgaacgtggattcatttatttccctagcatgaatattggtaatggctatttcagatattcagagagtggtcatctgcagaagtctaattctaattgggtatttaaaagagattctgtgcttgcacatgatttcaaagtgtgagtaatatgcatacagtccatgtattggaagagggtgatttttgtaaatgcaaagttaggctgatataactattacattagcctcagaggatactttcagaaattcctggggaatccttgtagctaggactctccttgttcaaagactaatatataaaatgatggccattgtgaatgcttaagttatggtctgaaacaaagaattgaacagattcagtcactatgccttgaaaattttcaaataatcagacaatgttcatgtcatgctagatatgttacagtaattgtactggctgccagaatacttcaaaataaaaattcataaatttaacttaacttttaccttcatgcagttcttttcggtgattaaacaggaggcgtattccagctactcactcagtgtgtattgattctgagtgatttagacttttgaatgttgtccagaaggtctttcactttctgtgatagtgattttcatgagcctcatagatgccttgccctgtggcatctgacatatatgcatttagcacggggcaagaaaagtcattcttgggaatggtggtggctagggggtcattgaatccggaaactatcgtagcctataaagggctccttttctctgcttcctcttgtcatttgctgtcctctgtcacattcaccctgactagaggcaaggcctcctaagaaaacagcaggggctgtgcacatttttaaaaaatattttgagtcattgccaatatatttatcactttagtcatcacccttttaaaataccaattgattcagttttttaaaagactgattgcatttacaatagctgcttttgttttaataatactctacatttataaaaggctaaaaaatatataagcttacaggggcagatatagtcacaccaacttaccatgatcaattccccactttttattgacggatctaaagatcttgagtggccaattatagctcattgttatccgagaacaatcacctctgaagcagttgttctgtgtactcttatgttcttgagttgagcaggaaacatttatcaaatgcagttttatattagactctcaaagcagcattttgaggtcacttttgttgcctccatttcccacttcagtgatgatggtacgaaagctctttttaaaaagttaagcctcataatcaaatttgtcttcagaattgttgatgtgactgaacttgggtcatttaaattggaagtcccacctcccaacttctacacaatcacaacaacatattctcatgagaagtagtgagaatgattacaaactttgctttgtgcatgtgtgtacatcaccttgaatggtaaatagatatatgtctctttaaatcatcaggcactgtgtaaatgctgccactttgaacgttaaaaatgaactaggcatattgctaaataatctagaaacaatgaaacaaatcaggtagatgatcacaaatacattaggaactttagaaaacgtttctatctcacttttgtgatagtgaggtgattctcaaggtttgtgagtttagcaagacagggttttgaaattgttcttattccaccaggtggcgccttctgctgagccaactgggacagttacctcttgagtgcttggctgtcttcttaaagccaaaaacaaaacaaaacaagacaagataaaacaaaacaaaacaaaacaaaacaaaacaaacaactgtgggcacacacaaagctcaaataaagtaaaagaacaaactccagttctgaaatacaacttcatagtactttttaaaacaacttttacagcaatggtaaaaattgtcatgcatttttcttttaagcattcatttttagtagcagagtaaattttcacaatgcacatgcaggtctcctaataactaacttatggtcagcttatgatgatgtagagcaggttttaaaggactaagtcaatatagctattctgcttttgaccattaggtaatactaaggggaaagcattttgataggggagttgtctttcaatgtttttattgccgccttctctaacatgcttgattaaaaatttgaaatgtatactaaagactgagttgtaaaaaagttcatgtttcttctcctcatatgtagacatgtcataatgtagtaaaaattattctttttcacatagagtcttgaaaacacattggaagggattctgaaaagcttgtttgaaccaggtctgtaaccacaggagctcggtgaccaagagtctcggcaagccttgggttcagagcatgagtgtgcaaagcaaacacaatacaacagtcatgtaatccccccataccaaactatatgggggggcataatattttcttctaacaaatgtttaaaatataccatgtaatttacagtgagagttatatatgatttggtcagaaattataattttggatgaataaagattatgctacgatttgagacagaatgtaagttttctgttctttgtttttcttgatgtgtgtgtgcatctgtgtttgggtatctgtgtgtctgtatgtccaatagccatgtcctgcattttcctctattgctctccaccttatgttttaaaggtaggagttctcactgaacctgacagtgtaattcactaactaaactagatgcccccaagcccaaggcttttcctgagagttcctgcttctggatctcctaactgggctgagcatttcaacttgggttctcccagttgaaaatcaagcagtttcctggctgagtcttctcctcagccccctatttttggtacttttgagacagtcttgttatgtaccccaagattgtcttgaactcccatgtatccaaggaagtcctccaactcatggtcctctctcctgagtgctgaagtgacaggtgtgaccccacccccaactttgcattttaccatctcttaattccttccttccttccttccttccttccttccttccttccttccttccttccttccttcctctcttccttccttccttccttcctttctttctttctttctttctttctttctttctttctttctttctttctttctttctttctctctttctttatcactttctttctttccagagtttctctgtttagccctggctgacctgaaactcactctgtagaccaggctgtccttgaactctgactcccaagtgctgggattaaaggcatgtgccagcactacccaactcatctcttaatttcttactttactcacttaaacataaaacactaaactaataaatatacaatataaatattttatatgtaagtcattttatctactgaattaagaacagaccacagaaatcccttgctgagaattattggcttttatatctatctatgtatttcaagggatgaacaaacgacacatttaaaaattaaattatataaaaacacattaaaggaaattgtgttatgaaatattaatgctacattatcttatgcatattacaccaaaaataaaatgtttaagctaattatctcccaaactgatgaaaaaaagccatttctaagtttcagtatcttgaattattatgactgtaaaatgttataatccttagtatgcaaagccatatttcttttatttagcatgtatcctgctacacatagacaattttcatgaatatgattgagagctttcgtactaccagtaataaatatttactaacatttgattatgggtatttgctagaagtcctaatgacctagttttaattttcaatttgacacgagatggaatcacctggaaaataagtctcagtgagggttggcctgaaggtgtatctactgggattgtcttgattgccctcactgactttgcctagaagtgggcagcaccagcctttgatcttaagctctgatatgtatcaaacaaagaccaatgagtaggtggtatgtattaattcatttctctgttcttacctgtgaatgtgacttcaatagctatttcaaattcctttcaccttgtatttcccacagttatgggttgtagcctataattataaggcaaaataaaccccttttgcttacttgcttttctccagtgtattttattgtagtggcacaaatgaatctctggcagacatgatgattttatatcttcattgtttctgtgagtgatggagactgtaagaactttacatgtttttataaggattaaatgagataatatgagaaagaagaatgccttttaaggaatacctgtctcatattcagacctctcattacatgtgaggtctgggagtttgagcctaaccaaaatttaaataataaaaaatcatatggtacctctaacagattctttaaagtttatagactctgaaaatttgcatgatttcgtggtttgtctgtgaatgtaagtatcatgtgacaatctttgcacttcaagacattcaggttttaaagcattttcttgcatctcagaatgcaatccttcaaaactgttcgatcatcccattttctaatggaccaggctaaaaataaatataggctagttttctaacattttaattaggtatcaaatgcattgcatatagtttccaatgcaattcacttagtcatataattagtatgacgagagtgcttgaaaaaaaaatgatgtgatttacagatctatgtcctagagacatagccatgaaactcatgtcttcacaggacatgccccctgatttgatgagggtgatcctccacccacttactcctactctctcctcactgccctagtatttccctatgctggggcattgagccttcacaggatcaagggcctcccctcccactaatgccagataaggtaatcttctgctacatttgcagatggagctgtgaatactctttgtatgttggtggtttagtcctttgaaactctgaggtgatctgattggttgatattgtttttcttcctgtggggttacaaaccccaccagctcttctagtccttgtcctaactcctccattggagtcctcatattgactcagacccagatgcacttatttttccatgcaaaaaataaaaaatctctaaagcattagaatcctccttctctctccatggcagttatcttctcatgaactacattcacctccatggtgattatcattgctaggtatagacagagataagtaatagcatttgtggaaatgaaaaggtagttaagatggagatttgtcttattcatatctctgggtgagctgtcctagatcctcagaaacgtttatgtttttataagcaatatgaaatcaaacatcaactgccactccaatcattttacatttatgtaagactgataaaaggtttttatcttgagttatactgctcagaaattatcattcaacatattcattgttatgtcttctacatgataaagtgagcctctgtttaccatgacattgtttatctaaaatggtaaaaatgttaataattttgaactagtgttcagataatatgcatacttcactgataagaacagaacatgtttgtgcaaacagaagaggaaaacactaaaggattttgcagatttggttatttggaggcagggaaatgaaaatgcaaggtgaatgttaagggcagagttaaacagaattcaggttcaagctgcctactacttatggtggcacccacagttcgtcaaaaattataggcacacaacaggaagaaggtgtggagaaagctgaaaagatcactcacatggcttgtgaaaaaccaaggaagaaaaatgaatatagctgcctttgtatttccaggcttctagacctttaagatctcctgagatgcttatttctctattctctattctctctctgtccctctctctgtctctctcactgtctctctttctctctgtgtctctgtctctgcctgtctctctgtctctctctgtctctgtctgtctctctgtctctgtctgtctctctgtctcttctctgtctctctgtctctgtctctgtctgtctctctgtctctctctgtctctctgtctctctctgtctctctgtctctgtctctgtgtctctgtctctctgtctgtctgtctgtctgtctgtctctctctctctctgtgtgtgtgtgtgtgtgtgtgtgtgtgtgtgtgtgtgtgtgtgtggtgtgagtacatgtgttgtggatgctggagttctcgactttgggcaccttcctctatcattcttcatttgtgttttgagacagagttcctcactgaattcaaagtttgctgtctcacctaagctgtcaggccagagagtctgaaggattcactaatccctgtactactgtcatagctgaaattatagacacatattgctgcccttggattctaatgttggcacttggtatgtgaacacacactacactcttttgaagtacttttggttgaccattctgtttccagaaatttacagaagctcacagatatgaaagccttataactttatttcagatgagaacttgtgacatttcatggggaagttttaaagataggcaatagactggagaaatagttcaacaataagaatcccgattgttctatcagcacaccagagttgccaatcccagaatcaagatcagacagctaacaaaggattataactctagggctctcaatgcccagggaaccctgtatacacacctaaagtaaaataaaaaaaatcataaaaggtaagtgagttgagttcataataaaaacagtctacactgggaaatgctctctcaacaaagtccatactatctgactttaatatcattgtaatttctcatacctattgatttcttaggttagaacaaatagctatgcatgaggttacaagaaagaaaataaagacaagtgagggaaacagtcatttttattagcttcatacccatctccttttagagagctaaatgaacattcgatttttattttgttcagtgggtgtctgccttagaagagcagggcaacaggactggattaaaattgagaacgtgaatggcaggctagccagtgatttatttaaaaacagagaactggggaaactactgaaagttgcatagttgatgccctcacggggatgtaggtgtctcccttttggtggaacaagaggttatgttcagcaagagaaactaagtaaatatacactctcaggcccatacatatgctaaccatgctccaaatacaggaataagatataatatttatggcatggacattttgcatttataaatgagaggataatgattcttttctttatttaattttttaaatatgatatgtgtgtgtctggttgtaggtatatgcttataagtgcagtgcatgcagagggcagaagagggcactggagtcacaggaggttgtgagtttatagaaatggctactaggaactgaactcagacacttgagcatagagctatctctgtgtgtgtgtttgtgtgtgtgtgtgtgtgtgtgtgtgtgagtgtgcgtttgtgtgtgtgtgtgtgagtgtgtgtgtgagagtgtgtatgtgtgactgtgtgcgtgtgcgtgtgtgtgtatgcgtgtgcttgtgtgtgtgtgtgtgcgcgtgtgtgagtgtgtgtgtgtgagagtgcgtatgtgtgagtgtgtgcgtgtgtgtgtatgcatgtgcttgtgtgtgtatgcgtgtgcgtgcgtgtgtgtgtgtgtgtgtgtgtgtgtgtgtgcgtgtgtgagtgtgtcttgtgtgtgggtgnnnnnnnnnnnnnnnnnnnnnnnnnnnnnnnnnnnnnnnnnnnnnnnnnnnnnnnnnnnnnnnnnnnnnnnnnnnnnnnnnnnnnnnnnnnnnnnnnnnnnnnnnnnnnnnnnnnnnnnnnnnnnnnnnnnnnnnnnnnnnnnnnnnnnnnnnnnnnnnnnnnnnnnnnnnnnnnnnnnnnnnnnnnnnnnnnnnnnnnnnnnnnnnnnnnnnnnnnnnnnnnnnnnnnnnnnnnnnnnnnnnnnnnnnnnnnnnnnnnnnnnnnnnnnnnnnnnnnnnnnnnnnnnnnnnnnnnnnnnnnnnnnnnnnnnnnnnnnnnnnnnnnnnnnnnnnnnnnnnnnnnnnnnnnnnnnnnnnnnnnnnnnnnnnnnnnnnnnnnnnnnnnnnnnnnnnnnnnnnnnnnnnnnnnnnnnnnnnnnnnnnnnnnnnnnnnnnnnnnnnnnnnnnnnnnnnnnnnnnnnnnnnnnnnnnnnnnnnnnnnnnnnnnnnnnnnnnnnnnnnnnnnnnnnnnnnnnnnnnnnnnnnnnnnnnnnnnnnnnnnnnnnnnnnnnnnnnnnnnnnnnnnnnnnnnnnnnnnnnnnnnnnnnnnnnnnnnnnnnnnnnnnnnnnnnnnnnnnnnnnnnnnnnnnnnnnnnnnnnnnnnnnnnnnnnnnnnnnnnnnnnnnnnnnnnnnnnnnnnnnnnnnnnnnnnnnnnnnnnnnnnnnnnnnnnnnnnnnnnnnnnnnnnnnnnnnnnnnnnnnnnnnnnnnnnnnnnnnnnnnnnnnnnnnnnnnnnnnnnnnnnnnncccttagtattttcctcgtttacattttcaatgctatcccaaagtcccccatacccacccacccccaatcccctacccacccactccccctttttggccctggcgttcccctgtactgggtcatataaagtttgcaagtccaatgggcctctctgcagtgatggccgactaggccatcttttgatacatatgcagctagagaaaagagctccgggatactggttagttcatattgttgttccacctatagggttgcagttccctttagctccttgggtaacttctctagctcctccattgggggccgtgtgacccatccaatagctgactgtgatcacccacttctgtgtttgctaggccccagcatagtctcacaagagagagctatatctgggtcctttcagcaaaatcttgctagtgtatgcaatggtgtcagcatttggaagctgattatggggtggatccctgcatatggcaatcactagatggtccatcctttcttcacagctccaaattttgtctctgcaactccttccatgtgtgttatttcttttatataagatttatttttggcatgtgtgtgcatgtgagtgcttgtaggcatgcatgtgtgtggagggcatgctctaatgtgaagaagccagaggggatatgttcacgtttgtgaagaatgtgtatcattctactttatttaggcagggctccctgaacccggaggaatgcagtaaaacgtgtctccctcctacaatgctggggtaacagaggcacatgcaagtaagcctaggtttttgtttctaatggatgcttgggattcaaactcaggtcctcgtgttcctgcagcaagtgcttacctgctgagctatctctacaactctcaaaaccatgtctttttgagtcttctgtctcccattttacacatgccatctccaaactcctgtaaagtttattctattttcttaaatttctgaaatcatttttttctgcaaaagtttatcccctggcatgaagaatgaatactgacaccttgccttctcaaaccccttcttgcaatagcacaaacatgagcaaagatatgcatggtctaagaatcctcagtcaaataacctgcttatcaaaaaagaaccatgacccagaagtgagcagactgtttctgtgtgtgtgtgtgtgtgtgtgtgtgtgtgtgtgtgtgtgtgtgaagatacacacagtccctagtgtggatgaggagcttataggagtattctaaatgttggtttatgcctcctagtatgtttgggacataagcatatttttcatactgcatatggcaggctagctggcacactgattttaggcttccatctctgcctttcatctcagcttaggagcagagggatnnnnnnnnnnnnnnnnnnnncatggcaagcacattacctatgcaagatgttaaccacttggctttaaaattgcaactcttagaaaaacggaataccagtatgtttttagaatttttataagcattttgtgtgacacaaacatggcacagatgttcacacacacacacacacacacacacacacacacacacacacatacacaccaagcatacacatacagaaacacacatgtgcaaacatgcatagaaatagacttgcattgatgtatgcacaaaactctgagtggatggatttcttagtaggtataattttattgcaagaagtatgattattttatttctaaacagagttgtcagggaaccaagttccaataccagggatgagaaatgtttatgtgctgaataaaacaatctatataaagaactcttgagtcacgcagaattcctgttggtggaaagaactagggatcgctattcatttaagatcacattgaaccccagaaccttgactgtctagattgagctcatttatgtggtctcttcctgaatttaatattgtacctggaagtcaaaggatatttttctcttactgtagttgggaggctggacatagggaggggcttttcacctatgacagactgacagatgcagcatttatcatttgattcttaatgtgtacttttacttgactgaatctctgtagtgttatggaaaattaaattatgctgaatgcaaggtcaccaaacatgggggcgggactttaaagagcctttccccattgctttgactaaatcagaaactgaaggtcacctttaatactgagctcctattttgttgatatgaagattatgtggagtcagctgtgctccagagcaaacatgctttgggaattggttaaggaaatacatagcatttgtttatatattccttatcagtgccaagaagtcaagggagtttgggcgttgaaggtggcaaactgcatatgcatcaggcctcctgagtttgttatttcctttcctcatctcagggataaattccatcttgtgcttataatacattctgtattcgagatggtgcttcattcctttcccaggctgcagtccttgagctgtaacagtgaagccaaaaaaaccaatatggaatcacagatggtgcaaatatttggaaataggtaaatacaatctaggattagctgcctgggcttggaaatgtcactttcgagttgcttatgggtcacataggccagtctttagttaaagaaaaccaggataaatgcatcatgatagaaaattgctgatttggagttgtaaaactaacaagcccataattgttatataaacttcaaaatgagccactctgaaagcaggaacaggtattttagagaggtcaaaacacccagagaggttatagaagagatacgaaattaaatagaaaccataacagtgcactgccatctgctgactttcctgaagccaatttttaaagagaaatagccattcgtgtgggtgtgtttaaggcagggaatactaaatgacctgggccttggaggaaacaaggggccaatatgaaatctacagatactcattactattaattgaaattatgagttcctatttctgtctccaagattttgaagaaggaaatgtgatttgtgtaatttccccctttacataatatatacctttttaaaaatatttttttactcacttgtatatgcatttgtctgtgtatgcatacatacttgtgggtgcaagtgctcagtggggccaaacgagtgtatcagatcccttttagttaggttacacgtggttataagggtgctggaaacacactgcatcatctttaaaagcctcatgaaactaatcatgcaattgtcacccagttgacaattgtgatgacacacagacaataaaacctacctaatcacagcactgatggatttgatgtgctgaaaaccagaatcagtctttcctaggagagaagttggtagaagagtaaccttctattatcagacttatagaagttgtttctgtttgtctgtgatgatttcaataaagaaaaatgtcagagagagctaaagtgggtggattcctgcagagttacaatgtttgtattaatagtatttattttcaggatattgcatattatatgatcaaattttatgtatggattctacttgcaagggacaatatcagctttgtagtgattggtggaagcttggggtgatggaccatcttgtttgtcaagtagcagaaataaggaaaactcagcttgagtttggatgtgaagaaagaagttatttacctatgtcaggtcatggtttagttggtaaagtctttgcctcacaaacatgaggacccgagttcaatttctaatacaacccatatattagaaaaagtaacattcagtaacattcacttttaatcccaacatcagggagagaaggacaagtggatccccgtggccctcaggctgatgccccaagcctacttggcatgttccaggccactgagataccatgtctccaaaaattaagggttagggatgacagtcacagttgacatgagacctccaatcttatatatatatatatatatatccttgtaacgtttcacctgctaaacacacttggacaaccagatccttctatggcaaagctttattgcttacttctcaggaagaccccgaacccggaaaatggagctgcttaaacacccctctgtgtgacatgtcagctcctgattagctgctcactcatcaccccactcctataccccaggatgggcagtgacttgacacgaatttactccagcacctgcgcacattgcttgtttactagttaggcactgtggaagccagcgccatcttgtaatggcgattgtgcatggcttcccacatctatctacctatctatctatctatctgtctgtctgtctgtctgtctgtctgtctgtctgtctgtgtgtgcatcataaacacatacatacatccacacaaagtttgttataaaaaaggaaacaaaaacaaacaacaactacctaaaatgcctctcgcttgaggagaagagacaggggcagaatagattacacagttcagagtactggttctaaagtagtcagtacaaatcagagcataggagatagggaggttttggaggggaaaccaggaaaggggataacatttgaaatgtaaataaagaaaatatctaataaaaaataaaaaaattaaaaaaaaaagaaaccaaaagttagtgcctgcttttcaggtctgatgaaattattgctgatgctgttgttgaaacattattattattattattattattattattattatcatcatcatcttcttcatcgtcatcatcatcattttattgccttctgcaagaatatgtatatatgtatatgttggtgtgtctgtatacaccagtgtgcatatacatgtgtgaaggtcagaatctaatctcggtagctttttctgcattatttttccaccagccttgaccagtgaaccccagagatcttcaaggttttagttccctaatgatgtgattacaactgcattccacaacaccctgcgtttcatgtgggtcctggaaatcaaactcagttcctcatgcttgcaagacaaatatttcactgatgaaaccatctccccagcctccaactcatctgtcttctgcaattaacatctaaatttacaaactccgagtctgtgttaaataataaatagtgagtacatcaaagttcagctttaatatgttagcacgcctccagaacccacctgcttcttcacctagcacagccacatatgcgctgactgtgcagtcctccaggcttgcttttaagagaaggacctgttcaagctttatttgcagttcttacattagtctgtttgtttgatttttttttttttttttacattactaactttagaataggggacgatgcagtgtgagcttacatctggtgtcacagctagcttcttcagcagttttatcaaagctctctacagggcctatagagcttcaagtgtcagagtcgattcacgagctgctatgtcctggaactcagccagtcagccaataaggctggtcgctgcctcccaacaaattggaccaggtgtctttgaaggacagagaagaacagtttgctaatctcaaatagcttctctgcagaagacgagattggataattgcacacaacagagagaacagccattctccgaactgaggttgagatccaattgcatggggccattgtccctggagagggctgtgctcacagctgccatgaaaaagagggtgagaacacacccatgtggtctgaattaagacacataagacttccttccttccttccttccttcattccttcatgaaaaacttccctggcagccagtactctgcttgttcttctcaaccatctccagatctgaaattccactttgctttcctttgttcctttaatttaataagcagagggtcttaacattttacatccaacttgtaattatttatctccacaagataaaatgatgtcatgcatatgtgtgtttatatccacatggtgtgtgaaggtgagaggttgaccttggacatctcctcaatcatttctccatcttgttgagtcactgtctctcaatgaaacacaagcttagtccttcagttaaaattgttggccagtgagcctccagaatctacctctctgcccatccccctaaattggagttgcaggcatatctaaccatacccagcttctgcaagggtgctgtggaatataaacttgggtccacatgcctgtacaccaagcacgttgctaactatctgcctagccatctgtgtgtgtttcataaatacattttcatgattattcgcctactctacacaaaggagttcagtgaataacttggtgcttagagaaacttactaaattatcaaaactcatcttcttgttatggctttcaatttctctgagaagcccatcttagtagattccagtgaaatattgttgtatattgacactgtctaaaggcctattctagaaaattaagggtattctctgtctgtactttctattcttgtcaccaccatttgtatgtggtactgaacatactgcttagagtttgggctcctcagaagtgagtctttttgttaatctttaaagagttgttttgttttaaataaattaatgtttaatctgcatatgtatctatgtaccatgtgtgtctggatgcttggaagttattagattattacatccactaggattgaagttacagaaggttgtgaactaacatcttggtgcttgaaatcaaacatgcaacaacttcctgatccctgagaacttgagttttctcttttagcatgaaggctagtttaaattgtcaatttgacataatatagaattagctttaagactattcagacagtcttaatatgttatttggatcctgttggcatgtgtgcatttctacaggagagggaagatccagtccattatgggcaatagtattccttggacttgaattctgaatgtgtaagaatggagaacaggagttaaatagtagcatatatgccttaatttccctctgctcttgactgtaaagatgacattcctactgtcttgacctcctattctgaacttatgaaccttaacttgtgaactaaaatcaactgtttctacccagttattatttttggcatggtattttaatcacagcaaaagatatgaaactagaatgcataattttaattaattataacttagaattgctgcacacaggtaggggttactgtattatggaggcaaagttaaacaattatttagcatgctatgagcatgctggtcactgggaaatgttaccacaaagcgaactgtaagctagagacattggagtggaagacaagtagcctgcatttaaagcttatccccagatgatgcctggtttctggactctgcacgggaagtgagctttcatttctcaccagaaagaattctctaagcttaatttatgtctttagtcaggatgaagtatgttgtggacgattctgaagaatctattgtcaaatgcttttattctaaaaatgggaacaaaataaacatcagtgatgacactattagctatttcttatcagtgaaacaaggtagttatttgaatctacatagttcatacataacacatagtagtcaaagcctaaaccacattttattttataaaagcccttcattacatagatgctcctctgaatcagtgagactgttcagtgtcaagggcttctcactaaagccttaaaacctgtttatatcaaagacctacagaaagccgtccaagaactgactcctgcaggttttcctgtgtcctactcatatggcccgtagcaccccctctcccaaacacagccacacaaacacaaataccagcacactcaataatcgtgtcagattccctgggcatggagtgcgaggcattgtgtcctggcataagcactggaacccaagatcctccgctagagcagccagtgcactttaccactgttatctctcctgctccaggtgcaacttgtatgacagaatcacactgtggggttgaggttatggaattcccaagagcatgcgagttgaagatgctatattatcacacgcaagcatacccactatatctactgtcttatctgtatgaaacagaggccaaggatttcctattgatagcaaatcaacaaggtatttcattaagcacattaaatcaaaccaaaatagacaaaccagatgaatcaaactgggaagcttctgcgcagcaagggggtagagatagagtgagaagaaaaacacacagagtagaaaaagaaaacctgaacactactcatctgagctatagtatactaatgagttaataggagcctaataatatcattaacggctctgctaaataatcctattaaaaatgggtaagattgtaaagtagagagttcccaaaggaaggcattctgatgaaaaaacaaaaacaaaaacaaaaaacaaaacaacaacaataaactcttaactaccttaaattaaaacaaacaaacaaacaaacaaaaacaaactacaggaaaaatcacagtgaggtatcatttcaccccagttagaatagcgactatcaaaacagatcttgggtcaagaagatggctaagcaggtaaaagtactgacaatgtaagcatgatagcctgaattcaatccctagaacactggtaaaggtggaagaagagaagagacttcaggtagttgtcttctgatctccacattgatgccatagcacacgtagaacatacatgtccatattagtaatgatgatgatgatgatgataaataataatattatccctaagggagaagtcttaagtttcagatctctcacttttggataagactcaaaggaaattaaatcagaatattaaagaggcacatgtgagttcttatttcctttaactttattcataatcacaatcacgtaaggaacagattcaaacttgatgcccatgtagaaatggatgggtaaagagaatgtagcatgtgtgtatatggaaatgtatccagatatgaaaagctgatcgcatttgtggcattgtggcattgtggcatagatttgttgacattgtgttaaaatttggtgcccaggaaatggtgtctcatgttctctctcacagacagaacacattcatcacactgtgtcataaaaccagggaggtggctaagtgcagccagaattacaacacatacaaatggacctgagtttgagctcctagcatgcacataaagctaggcacacaggtttctaagactggtgtttctgtgacagcctttgtgcatttgtacagaactgtttgttggcataccaatgatagctgacatgtttcctctctgaacattgcctgagaacaatgtattcctactgatcatgaccgaagtagcctcctgcagtatcagggctgtggatacctgagacagacaggtaaggatcaagtggggtcttatgtcatatggccccagtcaaactcttggacttgactgctctcagtttccttatctagaatgtgagaataaccacttgtattaagggactacttccaacattcctatacccattggtatttctgctactgctatatatataaaagaggatgaaatatgatttattaatcagagatcagatgatcagtcagctttattaatgatcaaatcattacttttagtctaataatgagaagagagctgtggttgttaacaccatgtatgagcataaacagtgtatgacccaggataacttctatatttcccaggtgaacttcctgagatcagataagtctgacctttagctgcacaacttagctaaactcaaggagctattgtttgcatctagaatgttctgcaatggctgattcctgtatgggaagctttgtctgtagcacttggtgagatttgtagatagtaaaaagacatggtgcttcagtgttaaagctttacacacacacacacacacacacacacacacacacacacatctcccatatccctcctcacagtagaaacataaacatcagcttggccattgcttggaattcaaatcatcataagaaaaggtgatggcttaagaaatgtgaagtattttaaacctatacaaacatagctaacttttaaaagattatattcatttctatttttttaatatactcaccttcccccatcccttccctctacccaaatccagtcagcatccatttccctttcgaaaaaagcaactctacaaggagtatccaccagatatggcataacatgatataataaggccctcatatcaagactgggtgtggcaaaccagaaggagggaaaaggttccaagaggcatagctaatttacttagtttttacttatttattttatttttcaaaacacaaattgaactagaaagttttcaaattattttaaaaatatgccagaaagagaaatagcagtatttgaatgttttattggtctattaatgacgactacaaaccatttcacaaaaggaattttttgttaaactcttcttgacatttgggaaaaataagctttcttattgcatttaagattctatgaatactacagagctaaagtcaaatggactcttttctcatttgtatatatatatatacatatatatacacatacacacacatatatatacatatatatatttatatacacatacatatatatgtgtgtatgtatgtatatatatgtatgtttgtatgctttatatatatatatatatatatatatatatatatatatatatagagagagagagagagagagagagagagagagagagacagatatacagagacagacagagagacagagagagaaatcagtttttccaatctgtgctacatcaaagtatatgtggtagtagataatcttttaacactaaaaagtgtgttcagctcctggaacagggttgtaattgattgatcaactgtctagctagcatatatgtaaccttgggcttcatatccagcaatgaatagacccaatacttaccacaagtactaaggaggtagaggcaattcaagtcatgctacactgttgcactgcaaactcaaataagcagcaaatctgggagtgtttgagagccaacattttcctccagagactttctcagtgaataatttgggaaatctggaaaatggggacatgacttatagaatatttttctaaaacttttcctgttcccacttagggtacaggaaaaacagtcattttcagtggcatgttttatttctttctttaattatatgagcatatgtatatgtgtgtaagtgcacagtcatgagccaccacacttgtgtcctgtaaaccaaacgtaggttctctgatagaacagtatacagtttttactactgagatatttctccaatcatggtgtggctttatcaaaaagagtgcaaaaaatggtttatttcataacagatatggacctgctgaaattggtatatcaaaccgatgtcaataagctgaattatgtacatttaggctgttattatactgttatattttacatgatgtagattatccagaggaatttctacacacacacacacagacacacacacacacacacacagagagagagagacagagacagagacagacagacagacagacagacagaaacagagacacagagagacagagagacagagacagagagaaacacagaaagagaaacctagaaagtgaagttgcatgaatattgagaagacaacatgtgaagtcatatttcttctgattctgttgttttctgagatgatcgcaaaagcctgacaagactaaggctgtctttggaggttgcccttgaggaatgtgtccgttcatcacaggtgcacagtagtcacccatgggagagctgtaacaggtgaagtcaagccagctgtaatgaatgaccaaggtcaatatcagcttctgctgtatttggatattaataattgtttgataagaaaggcaggtatttatctcattacctaacacaccttcaaacatttgcacaagagacagatatctgcaagtgagcatgggctgcctctcattctctgaatctgagctgtgactggggacaagttttaaataagctctgccattaatagtcttaaagacatacactcacagaaagaaataatttactattgcatgaaagttacaaagaatactaaagatattttaaggatattttataaatagtttcttcaacaattgagaaaaaataaattttgtagagtccttactactgcattaatcatgttacaaaatttatggtggtataaaaacattgtttaatattttccctttaagaaatgtgttagggacattacaaaagttagatcacaggtgggttatagctttaaggtagtcaacaaataggaataatttaatgatattgtcaggctatttctgagacttaaaactcactgcatattaggttgttatttccaggacttgtttttatagatgagatgttctacagatgcttagattatattcatacaatgatttgtaggctcttgtacattgctttaatattattagatggtgaaatacgtctcattcatgagaaatcataaggtcaatttaaattttgtgtagtatgtgacaaggtaggcaaaagaatttattgtatgagcatggaagcctcagttaaaatccaagacacctatggaaaaatgtgttgtttacacatatctattgtcctagtgccactaaggtgacaagtcaggatactctctgggctttactgcctgtcattctaactcaaggttcaatgaactcaagggaatgtgttggaggacagactagtacatttgaaatccttttcttgcctctgtgtgctcataggatatcaatcctctcacatgtgtgaactacacacaaacacacaccatagaaacacacacacacatatcataaacacataatatgcatacatgcatgcacataaatacacagagatgtcataaacacacaccatacacacaaaccacacacacacatacacacacatcataaacacaaccagacacacatagacacacattcaaacacacacatacacaataaatacaatgatacattcacacatcataaacaagacacacacacaatcacacacacctacacacccacacacagagtaattttaaacatcaacgtccactaacctattatttagagcatttcagtaaagaaatactaaatgacaaaaattttaattgatcaggcaagtgactgtactaaaaacgaactcacagaatattaatgaaccatttcaccaaattcattatgcatgaaaaattaaccactagaatcttaaaaatgatagagtctttccaaattcagaaagaaatgcataaaatttaaatgcttattgaggcatattttaactttatgtcatcctctattaaaatgctgagtctgttaaatttatggagggaactagaagaaagatccatggggcttagattatgatcaacaaaccacaaaaaattaacgtaaatatagacatttactcctgtctaattgggtgtggcaaaaatgctagaaaaatgggaacctttttcatatgagtctaaatcctcaaggagaaatgacatgaaaactagggaactgatggagtgtgctaagctttatctgttcaatggcaaattactatccaggaagtttcatttattatgaattgatgcaagtcatgtccacatattgatttaagtcatatatcatatatatgtggaataaattcatatatatggatgaagtaaagtacaaaatatatatgaatatagaccatatatgtatattgatgaaagtcaaacacatgtatggaagaaattcatgcacacatatacatattcacacacaaacatatacatatatatacatatatatttacatacatatataaatatatattttaataaaagttgtttttacaactatatctcatatggaagaagagaagtccatcatggcttccaaaatcagatgatcaaaacaatgggtacaaaatctggatggaagaatcatggaacctgaaaaattatgactacaaaaatggaagcttttcaaagttaagaagcatagagagttatgattaggatcagactttatagcacttagggaagaaaggatacaacgactgaaggggaatatgatagtttataaggaacaggagagagggatgaaaactgagatggaagtcatgtagatcaagagatttgattactattgtttatctggttccttattctaagaatattgaagggtatttgtgggttctaggcaacatcaaatgtttgagattgggagtgtgggagaaagtgtaattgacaagacagggtcatggagaatgtcaggtgactagatccttctatataaagcttagggtaatttctaagacattatggttgctaaatgttcattgaatttaactaaaagagaccattagtagagtaatttaaccctgcagagatgcattaagaaagcaaactgtattgcagtgtcttaaaaaaaaaaaagtttagtctctgataaaatacagctgagccaggaaaaaaatctttgcagaggatatgcagaaaagtagaaacccatgtaatactgcttcttccttctccttctccttctccttctccttctccttctccttctccttctccttctccttctccttctccttctccttctccttctccttctccttctccttctccttctccttctccttctccttctcctcctcctactcctcctcnnnnnnnnnnnnnnnnnnnnnnnnnnnnnnnnnnnnnnnnnnnnnnnnnnnnnnnnnnnnnnnnnnnnnnnnnnnnnnnnnnnnnnnnnnnnnnnnnnnnnnnnnnnnnnnnnnnnnnnnnnnnnnnnnnnnnnnnnnnnnnnnnnnnnnnnnnnnnnnnnnnnnnnnnnnnnnnnnnnnnnnnnnnnnnnnnnnnnnnnnnnnnnnnnnnnnnnnnnnnnnnnnnnnnnnnnnnnnnnnnnnnnnnnnnnnnnnnnnnnnnnnnnnnnnnnnnnnnnnnnnnnnnnnnnnnnnnnnnnnnnnnnnnnnnnnnnnnnnnnnnnnnnnnnnnnnnnnnnnnnnnnnnnnnnnnnnnnnnnnnnnnnnnnnnnnnnnnnnnnnnnnnnnnnnnnnnnnnnnnnnnnnnnnnnnnnnnnnnnnnnnnnnnnnnnnnnnnnnnnnnnnnnnnnnnnnnnnnnnnnnnnnnntgaatcgcatctgagagatctcagaggtctggattagttgagactgctggtcttcctatgaggtcaccttgctcctcagcttcttccagcctttccctaattcaaccacagaggttctggacttcagtgcattggttggatgtaaatatttatgtctccttacatatataaaaacactctacaatagcataaaccaaatttggagtagaaaaatctaaacattttttaaaatgtacaaggtgtcattgggtataactaaaatactaaatggcaattaccctaaatgatgaggaatttggcagcatctggtaaaactgaatgcagttttacactttgatgtaccaatcacagctttagcaatttattttgagtaattggagcaaatgagaaaagacatgtacttaagattattaactgtgaataattttgtagaattacctaacaaataaaatgcacttgtctaaaatgattaagaaatgtatataccatactacagttacagtcatatagacatatgtgtatgtgtgtgtgtgtgtgtgtgtgtgtgtgtgtgtacatgtattgcagttgtatatatgtgtatgtatctgtgtacacactccaggtagttagaagtatgtattatttgctactattttttaatcaaaaagggatgatatataataatttgttaaaatatattaataaaaagatggctgagtatgtagcttagttgataagaatgcttttctaaatgtcttgattttctaaaaaatcagactatgacaaaacaccatgaccaaggaaacttagaaaagtgttttattgagcttatgtttttaaaagattagtgtctgtgattgtagaacaaaaacatgcagtcagaaagaggtgagagctcacatagtgaaccacagacccaaggtggcgagaagggtggtgctggtagagggaaggtgagcgagtgagccttggactgactcttttgaaacctcagtgcatactcccagtgacatgcttatactttcaaatcctttccaaagagtgtcatcaactgaggaccaagtagtcaagcttcaaacatatttgtttatggatgcattcctattcaaaccaacacacttagcattggcagcttggggttcgatgtctggtaccacataaaccaggattattagtgcacacttgcaataccagcactggtggtaaaggcaggagatcaagaagttcaaggccatctttggtgagatcaaaaatatgaggcctgccagaatgatatctcaaaaccacccccaaaatataaaaggacacacatatttatttgttttaagctgtgtaggacaagggatgatattaagttgagaacatattcatttttgtatatacaataacttgtagaatttttgtcataatttatatacatttaagtatgaaaatttaagtttgaaaatacacacacatataaatatatatatatatacttgatgacataagatgtagaactcttttaatgattttaaaatatagtaacataggactttgctattacatgcagagtagaatattctcaggtcaaaaaaaaatcttagtaaagtaacgtctgttcatcttatgttaaagtggtttatatacatttatgtactctgtgtgtgtggttcatatattactacacacggggggggggggtcctgtattcttctgccatgtgggtgcctcagagaggagctcagctagtggagcatggcagtgattgtatttattccttgagtccttttgacagccccctttgtgcatgtgagaaggatctcattgtccttcccaaggggataaagaaacaggaatatggaagtttgaaccccagccgagtttcagaacagaatctgatttcctgccattgcagcttgtactgttgcacggtgctgctgatagccagtgttgattgtcatgttagactgaaacacactaggaaattagtacaggacacctgtgagtatacctatgaatatctccagtgagaatgagtaaaaggaggtgaactttgaaatttccctgcaggctggtgacctgtggaaccttaagggagcaaaggagaaagccagctagtaaaagtatgccttctcttacatcctggccaccatgagttgaaaaatattttctatcttggactcttgtggccatgatgttctcagtccactcacagactcagggggtggggccatctgaccctgtaatgaagtctatggaaactaagtgaaataaatcctttgtcctttaaataacttccccaaggttttttgatccgatgaatgagaacctcaggataatgcattgcctagagaagaagtgtgaagtgatatttcaagctactcttttctactgccttacaacatgctgggaacccttggagaatcgagatggcatggaagtagaatgaacttttctgtgtgacacttggtataatgcgatatgttggaggcagcacaaatcacacagtatttcttgtaacttaatcttgggagatgcattgctggttatcccccaggatagcagctccctcctgttgacttttctttttctaattaccttgaaggaggacagtgtctgctggggagtatactataaatacatagcgcacgttaatcctctttgcagacttgccaaatgtatgttgaagatgcagcatagtaattagagaatgtgaggctctaattcaaaacccattttgcactcatgagacataataaaagcatctacttctgtgtggctttcaagtgagacatatctctaaggtgatgtggtctttgcccctttgtgatatagtgttattgtctgccatgaaagatgttaagattatacattatttatattcaagtttaatgaaacaccataccacattaatgacaaaccttgaaagaaatatttgattgggttggcaaccttgattcctggatggggaaaagaaaaaggcctataaacacagataacttttgcctctgttgcttgcccattaaagtaataacaaatttacttcatcataagaccttgctcccctactatgtctcactggaggctcacagcaatggactgaacctattttgctcatatgtctctttaaaattgtgagtttatttctagaggcaattaattttaagctcggttgttgatttcagcatacaacgtgaatgcacagcttagatctcacctttgcaggtgttaatttgtaagataaatctgacatggagctgggcagatggctcagtggttaaacagcttgccaagtttgcaagaagactgtaacaacatccccagaacccatataaatgccaagtaggtattctgatccaaagataacttcagcctttgaggctacagagacagatgatccaaggagtacactgattagtgagaccactcacagtttctgtaatctctatatatgactgagagaccctccctctaaaaactaaagtggcgagcaatcaaggaagatccccaacatcaacaccagacagacctccaaacatattagcatgcatatccacttgcacacgtgcatgttcacatacatgaatatacaagaacatacaccacacacatacatgtggaaagaaaatgaaaatatacattctgttatgagaaatcatgagaattgtaataaaactatgtgtacttggaaattattattacgttttgttcttacaaaataataaacaaacttggggagaacttggtcttatgtactgtaggctagcctcatacctattatatagctgatcctcttacctctgccacctaagagttgagaatgcaacctcacacaatgcctagtttctgcagtgctggtgtctagacactgtgcttaatacttgctaagtaagcacactgccatactctactccagctgtgactgaattcttaacaacaacttcctattccggtggtgccttgtgattctccttcctttgatagcaagaattgctcctctaccttaggagcaattgtcatgtgttcaacacatgttagaatgttcttctctctttactgtaacgccaatacatggtatagtatgtctatgtcattgctttaaatttgatgaaaaattgcattttctatatcaactgcatatttaaaggaagaagacagcatataaaggacacatcttgaaaggagtccacaggagcagtatctcatgccaatctgaagtgtttttagaataaaggaaaacatacagctcatccaaatgtcattttatccaggaagcagatgttcattttatttatgaattgtgaacgatctatcaagccccacaatattttcccagccattttttcctgcggttttctgatttattttacatgttaaaaaagaaccaattcaaatgcagcaaagtaatttaagttcaccttatatgtgtctctctcattgcagaatcttcttcttgtagatgtcccatatttatcagactattttcagtttggctctgcctggctttgggacctaccctttaacccctagataggcttggaatattgatagtgtcccactagacaacgagtgagttaatattcttaaccatgaaaaacattctaaaattatcactacaaaaatatttttgtaatcaaaacttttcagagtatgtaggcttccaagtttgggaattcaaaatgtttacagatttttagaatccatttacaaatttgaaaatctacaatagttaagactaacctagaaatttgaaaactatatttgccctcattttagcagactaattggaccctgatgctggaacatctgtgtgagtgaggagtttggttggagcctttgaatgtatgtatgatttaggtgtgaatgtcataggaaagcctaaattatttcttcagtcaccttccaccttttgtttgtttggggatttctctttggcctacggcttttgcatatcagcaagacttagactaagtggtttttggatcttttttttttttttaattttttttttaattaggtattttcctcatttacattttcaatgctatcccaaaggtcccccatacccacccccccaatctcctacccacccactccccctttttggccccggcgttcccctgtactggggcatataaagtttgcaagtccaatgggcctctctttgcagtgatggccgactaggccatcaaaatgtctcctttccacattccatcttgaagagccaggcatgcaggcattttatgcataatatacagcttctttgcttggtttctggagatccaaagtcatgtcattctgtttgtaaagcaagcacttcgccaacaggggaaaaatggaaaaaacaggattagcatttgttgtcagtttaaataaaatagggcaaaggcttttgattgttttgtaaagtactgatgaatgtttgcagatctatcatctgaccgctcccacaaatgttactacatgtgaaggtgggctgtggtgtgtaatcagactgctgtgaagcaggttgctacaggcatgtttggaggccaagcagaattcagctgcagcacaagggtgactgaaatcacaggctgttgctaaccatttagagcagaaaagaaaagcatttcttatctcagagctgaagcccttcttgaaaatcaatgaataaagcatagcctagttgttgtgaagtaaagaacattattggcacatacaaattatgtagggagaagattagaatgaattgaaggatagactcatagacttacttgaacaattattaagataattttgcatcagaaataagctaccacaattaagtgatatactgctgctgtatttcagccaatataaactatttggtcagaggaaatataatgtatgttgtgtatctctcctatgcatcatatttgcatgtgaatgggatcaattgtgtaaaggtgcaggctctcatatgcttttgaaatcagaggttgacattggtgtcttttgtgattaatctccatttcatttattgaggtatgacctgtccatgaacccatagtctcataatccagctagttatcttagtcatcttgctaaaggcattgcctggcttctcctcctgaggtctgggattataggtggctgttatgccagcacactccttactcagcttctgaggataggagctctgcttttatgcttgcatggcaactactttttctacggagtcatctccccagctccaggatcatgaatttcaatactacattttaactaaaactttacatttttaggttcaatactttattggttctctttagacaatgatctctgatattttcactgtacatggagcctacattggagcccaatggatgatttgatttgtctgggtgttctgaagttggaagactatttaaaatctatttgtcactactaacagattaggcaatagcatgaatgaagccctcattttgacatcctccaattgtaagtggccaagtgtgagtgaccaagtgtgagttttctgagtatgaccctcatcatactcagaaaacaagagctacataaaacagaagatgcttttgaaatgtttaagatctgtaagacttgacatcgtcatctccctgaactcaactcccttccctcttagctctagcccccatcaccttctctgtttgggtagagtaagcatgtatatgtatatgtatatatgtgtatgtgtatgtgtatgtgtatgtgtgtgtgtgtgtgtgtgtgtgtgtgtgtgtgtgtgtgtgtgtatgtgtatgtgtatgtgtatgtgtatgtgtatgtgtatatgtatatgtatgtgtacatgtgtgtatgcatgtaaaggcaataggctgaattttttctttatcaacatccatctagcttttttcagatagcttctctcaagaaatgtgccactttctgctctgactagattagctcatcaatgtattgcaggaatcttcttatctttatctcttcagtgctgtgaagacaggtacctgccatcatgctctggggttttgcttttattagtatttgtgtgtaacttgtgtgtgtgtgtgtgtgtgtgtgtgtctctgtatatgtgtgtgtatgtgtgcatgtgtgtatgtgctatgtatgtaccacaggctcgcatagaagccagaagacaactctagacaactctagacaactctagaggcttggttctcttctttcatcatgtgggtcccaaagatcaaactcagttgctcagtttttgctacaagcacctttacctgctgactcatctatctggcttgagattcacaggaatcttcaaagttgttccttgaaatttgtctcttctaagatcatgtatattgtacctattttctagttgagatttatgacacattctaatggatgtttcactgtagccatgagaatgttagttgtcgacaattctgtgaatgcttttgtatgtaatacactagctttcaggagctaagtatgaaaactattaaaggtaactattaactagtcacctctctcttcttttaaccttctgtactatagaacccaaccattgtgcacttcccatttgaatttctagggtgttaaataacaaataacttaaagaaaactttgacctcaggagccttagagtgttctctattctgataccatccttatgtcctgaattttttgaaagaaaaattgcaatttctttagggctagatgtttatctttgttcatttgattctcctgtcttgggaaagtttcaaggctgatgatcaaaggggaaactgggttgagtttgaattgtcctatatgtcagaagcttagtgagagaattattaatgccacagacaagcagaaggacatcttgacaatctctctgttgggagtttaactaccaatgccacagatagtcagacagcatactaggttctctcgtgatatgatattctatgcctgggaatcagaataggacattgtttgtataagtctcagaagaaaggagagatttcatgtacacaggctgtctctaattcttagttaccaaggagaagggaggaatttcatgagaagatatgaaccccgctaagaatatggctgaagaggaacacatttatttcagttgtacccattatatggaaagaagatgtccagctgcctggtacctgtacctttatgatgtttcagtttagtaacctgaacctataaacttccttggcacataagaatagcacctataatcctcccagaactcaggcatccaactattatgttaaaagtttacaaattcacagagagactcagtaaagtgcttgtaatttctctacagtatgaagaaagaggctgctatatttgggcatggcttcagaagccctttatctcaaacctgacagtcccacatcctcctgtctccactgtctctcagtctccaataccgtactccttacattctgcatgtacagtgaatagatagttagagaagatagtcaccatgctgtgattggcatctcagtcttgtctttatgggtgggttaaaagtatctgggtttcctaaggcataatttacaggtatagatctgagtttaggttcctgtcatataatatgtgaaaatgtcagcctgatatattgagcaatgaaactaagtcatagtattgtgttttaaaaacaaaatagaggggctgagaagatggctcagtgggtaagagcactcttacccatgagtacctgtgtttgtttgcctaatattcatttagaaagacagctatgtctgcccattttccccatgttctctgttggtaagatatggtgaagaaggagagtgggaatattagaacagcacaccctacatcttcctctgtcctccactggtgcagaagttactacatagggtaagcagagttttttttttttttgttgttgttgttgttgttgttgttgtctccatcccagtttgtagtttgtagcaaggatgtttaggactgcagcaatgcaaactggctttttcagctgaactttgtcttccctgacagatggtttgtttgggcatcttttccattctgagcagggccatttctgaagaatgcaggctttgagagagatcatttgttgcaaagaagcctagctttcaaataactctcaccactgccaatctctcctgtaattctcaaatttttctcataggtgtacaagaagccctgtggtgagattaagcattcagtaattttcccccaaagtcattaggcacctcacatttaatcttttatatatgctgattaaaaatgaaggttgattaagtaacaacaaagagactcattcagaaaacaactctggcatattctttggtgtgtttggtggaaatgaataatttattagggaggatatgactttataagaatattgtttcctgatctaggcagacccctggagaaggtaataactcagagtctgctctgctaacctacttctgtgcttgtttctgtgcttaatagccttttgccatgtagtctctgaacactcttctagagctgatatggttaaattgacatgcttttgagaatgacagagtccttttctacttgatgatctagagtcctggaaaattccatagccattaaaaccattctgagctgtagagttttggggaacttgtttcatgaattcaaagaataaaattgagagggaggagatttaaagagtattttattatagattcataggtgatagacatacagacagagacagagagacagaaagaaagacagacagagacacagatacaaacaatgatagagacacagagacagatagcagagttcctattgggtcccaggaaatagggtaccatccagctgctagtctatggggattttactagacacatggcacaaataggggtgatatatgggatggggtgagctgcttatcccaattggcacaacctagtgtccaggtggtctcccctgattttcagtcatacagactgacacaacccttagacagaggttcttatttaagagatgacaaaggaacagggaccataactgtctctggcattgctgatctctatcaaagaccactgctttacagttcctcctctacctgaccagtttctgtctccagttttcattagaatcacactctgaaatatacacctcagcctcttgatctttcttgcttccctcatgatcatgagagtccatgaatctttatgcttttctatttgaatctttccatataatgggacagaatatgttttatataaataaagctaaattattgctgattgaatgaatttatttcccttttttttctatttccattttcataagcagttcagagctcagtccccaagaaatttccctaatagtgaagaagtgagcatgctaattcttcattaggaaaggaagaaagaaaacattaatatttggaaacaagaggaatttcttggttcttgagtcacaacactagtggactcctattttagaattctctcttaactctattaagagactaaatggttacttttcaaaatgataaaagaatacattgggagcaattttactatggaatagtggtagatttttaaaagagatttgttgaaatagtctgcagggtttgcatgtactgactaaggtgtgttcttatgaaatagcctagtaatctgtaccaatttaatgattttgctaaacatttttaagtagggaacttgagctatgagatggttcagcaagtgaagatggttgctatgaatcttgactaccagagttcacttcctgagaatcctaatttgccctctagccctgcataagctcattggtaagaataagtaagtactataagaaaaaaatactaaagaagtaaaatacttagcaaaaaatatgtgagtccctaagtgctaaaaaaatcaaaaaagatgatgaggtagaggagacaccttgaaactgtatcattgataaatcccttcccaaacacatttggcttaaatcacagagctatatccctgtttcttttgaagtcagttcaggatttcatagcacttctcagctgacaaagacataaagaagaatcttgcaattgggctagaaacaaataaccaaactaaaacacaaacaaagaaactagaaatgttccttggcaagtaggacatctttgtactaaagctcacactgcactcaaggtttgtgcaaatgattttgtaggaaaacatggtctatcttccatcttccacatgttgcaaattcttccttttccatccacatggcactatgtacaaagtaaaggctaaaatgcttcctgagctgtgcctttagatatcaaaatttgcttctccatcaagagacgttgcactaagaattcttgtcagagctctaggcaataacctcacctcttttcatgcaaacaaccctaattaaactcagggcttcacattgaaacaaaatatgaaatataggagtggggatcctatctacaagaaaggaagttcatcagtcaagagagggatggaggtggacaaagggaatgaaggatgggaatgacacagatacatcaggtacatggatgagattaccaaagcaaggtagactgtttgcaaaatgtatttacaaaagaagtaaaatattaaagaaaaagttgttgtcacagtgtataccccagtaatccaggtttgatcacctaaccttcagaaagcaactttgaagagccaaattaatactataaaaccagtacaagaggtttattcaatgtggagaaatgaaaagtgggacaaagagatacattgacttccagttctaatccatctttggtgtcctgaacagagatgaaagtcaaagtggaggaccaggatcatgcatatctaagcagtccttatcaaggtgtggtcctactcaacactaaccctaactaattctctgggttctggtatctccttcaggatgatctgatcacttgtcagaaccctgtgaaatctccctccaggagacaaactacctctctggctagtgccagattcagccttttcctccttctcacttgagatttctaggagaaaatttcacttattgtagtccattgtctcaacaatctaatagtcaaattgtggagcacagtaacaatagtgtgtcctaggatcaagaatttaagaacaataagggatccaaattggacttcaaattataactgatacattctttagatgctactcatgaagatgattttatagttgattaaaatcatccaaagagggtagaagtatagctcatctgttaagatgatgctactcaagggaagaagagttcagttacagactccacagttccacctacaactccatccataggggatctgttaacatcttctggtgtacacacacacacatacatgtacacatacacgtacacacacacacacacaaatttaagttgcaaaagatatattttcaatatttgttaaaaattttaaaagtaaagaatgttgaatataaattaagcagctttctatgaccaaatatcacaaggacattttcccctagtttatcacaaaatacctggagtaacagttgcttagtgaattggttccctttacatttttctgattaaaagcccttggaatttatatgacctaattcagctggtattaatacttttgcaattatttggctttagtctacttgcaactgaattatttgcctcttcttttattaggaaatctgaatcaaatgtatttatattgtctttgatcatatcacaatttagattcaaagtgaattctttatattatttgatttatttcttttttcattcagagcaacagtttttcaaactataaagcaccactaatttaacataattgtgtgcattaagaaaatatatcagtctaataaaaatatgagactaagaaacacttggaaaatagttggtatgtgtcttaatttgggtatctgttgctgtgaggaaacaccatgaagaaaaataagttggggaagatagagtttataaggcttacacttccatatcactgttcatgaaaggaagttagaacaggaactcaaacagggcaggaaactggagtcagaagctgatgtacagtccataggaggaggatgcttactggcttgctcctcatggcttgttcagcctgctttcttattgaacccaggactacaagcccagggatggcaccacccacagtaggctgagccttccctctttaatcttatctagaaaatgccctgaaatcttagctacagcctaaccttaagaaggcaatttctatctttttttttaaattaggtattttcttcatttacattttcaatgctatcccaaaagtcccccgtacccaccccaactcccctacgcaaccattcccacttctttgccctggcattcccctgtactgaggcatataaagtttgtaagaccaatgggcctctctttccaatgatggccgactaggccatcttctgatagatatgcagctagagacacaagctctggggtactggttagttcacaatgttgttccacctatagggttgcagatccctttagctccttggttactttctctagctcctccattgggggccctgtgatccatccaatagctgactgtgagcatccacttctgtgtttgctaggccccagcatagcctcacaagagacagctatatctgggtcctttcagcaaaatcttgctaatgtatgcaatggtgatagcttttggaggctgattatgggatggatccctggttatggcagtctttagatggtccatcctttcgtctcagctcccaactttgtctctgttactccttccatggttggtttgttcccaattctaagaaggggcaaagtgtccacattttggtctttattattcttgagtttcatgtgttttgcagattgtatcttgtatcttgggtaaaggcaatttcttaactcaggttccattctctcaggtgacttcagcttatgtcaatttaacttaaaactatccagtatgttggtataactgaattaacagtaatttaactttgccaattgtaacaagattaaggtgaagtagtctgaaatgggtgctggtggccacacagaataggtggctttaaggtccctctttttatcaagcacaaatgaacaataagaataaagcatcctccatctatattatcagccaacatagggaatctttcttcttcttcttcttcttcttcttcttcttcttcttcttcttcttcttcttcttcttcttcttcttcttcctcttcctcttcctcttcctctttcttctttcttctttcttctttcttctttcttctttcttctttcttctttcttctttcttctttcttctttcttnnnnnnnnnnnnnnnnnnnnccccccttctcctcctcctcctcctcctcctcctcctcctcctccttcttcttcttcttcttcttcttcttcttcttcttcttcttcttctctctctctctctctctctctctctctctttctctctctctctcttcatttattcatttattttatgtaggtgagttcattgtctctctcttcagacacaccagaatagggcatcagatatccttacagatgcttgtgagccaccaggtagttacttgaaattgaactcaggacctgtagaagagcagttggtgctcttaactgctgagtcatctctccaaccacagaaatctcctttcttatagtgttagtcaaaaaagaaaatcctttgagagtcaaagtttatatttgaaaagaagtaaatgacaatatgtgcctgaggcaaaagacaccgtcaataagacaaaaagaccaccaacagattgggaaaggatctttacctatcctaaatcagataggggactaatatccaacatatataaagaactcaagaaggtggacttcagaaaatcaaataaccccattaaaaaatggggctcagaactgaacaaagaattctcacctgaggaataccgaatggcagagaagcacttgaaaaaatgttcaacatccttaatcatcagggaaatgcaaatcaaaacaaccctgagattccacctcacaccagtcagaatggctaagatcaaaaattcaggtgacagcagatgctggcgtggatgtggagaaagaggaacactcctccattgttggtgggagtgcaggcttgtacaaccactctggaaatcagtctggcggttcctcagaaaactggacatagtactaccggaggatccagcaatacctctcctgggcatatatccataagatgccccaacaggtaagaaggacacatgctccactatgttcatagcagccttatttataatagccagaagctggaaagaacctagatgcccctcaacagaggaatggatacagaaaatgtggtacatctacacaatggagtactactcagctatcaaaaagaatgaatttatgaagttcctagccaaatggatggacctggagggcatcatcctgagtgaggtaacacattcacaaagaaactcacacaatatgtattcactgataagtggatattagccccaaacctaggatacccaagatataagatataatttgttaaacacatgaaactcaagaagaatgaagactgaagtgtggacactatgcccctccttagatttgggaacaaaacacccatggaaggagttacagagacaaagtttggagctgagatgaaaggatggaccatgtagagactgccatatccagggatccaccccataatcagcatccaaacgctgacaccattgcatacactagcaagattttattgaaaggacccagatgtagctgtctcttgtgagactatgccggggcctagcaaacacagaagtggatgctcacagtcagctaatggatggatcatagggctcccaatggaggagctagagaaagtagccaaggagctaaagggatctgcaaccctataggtggaacaacattatgaactaaccagtaccccggagctcttggctctagctgcatatatatcaaaagatggcctagtcggccgtcactggaaagagaggaccattggacttgcaaactttatatgccccagtacaggggaacaccagggccaaaaagggggagtgggtgggcaggggagtgggggtgggtggatatgggggacttttggtatagcattggaaatgtaaatgagttaaatacctaataaaaaaatgaaaaaaaaatatgtgcctgaggtgtgtaatttaatcatataattgacaaaatatggaatcatttgggatagaaatctcacaaaggagcaatccatagtatgtcaaactatggacacatctgtagggagtttccgtaattgggtaactgaagttggaagacccacttatagtagtcggaagatccactgaatgtgggtggtaatctggacttaataaaggagagagaaatctgaacatgaacatacattcatgaattatgtcaatgataaagcttgctacttctaagttccagtagccttgacttccttaatataatggactatagtatggagttgttagtcaaatgaagtcctttgtcattaaactgctttaatcatgctttatcacagcaacaggaaacaaaactaacacagtggtcaaattaagtttagaaatggctttctaaagtataatttgactatcaaagtggaaagaaaacatagaaaagaatgtcctagtcatgtggctatgtgagaacaggagcaatggttcaaccaaagtgatcagattcgtcttagatctatccatccagatcctatcaaggatggataggtcttgatccattttttttaatgtacattcttctattgagaacattttgaagatggagatgctacattccaccttattaaacttacctaaaataagcagagttgagcatggtaacatccccaatttccatcattatgtacttcctgttatctggtgcattgagtatgccagtctatatgctaaagagatggcccaatggctcatagtgccacaggctactcttgtagagaacataagttcagtttccagcatcagtgctagaggcctcataacttcccatagcgccagcttcagggaatctaacaccttcctgcagactgtgtgaagacctgcaatctcaagcacgtacttttacacacacacacacacacacacacacacacaacatatatacacacacaattaaaaataaatctttaaaaatgtatcactgttataaaaataataaaccacacacacaggcatgcccacacagactcctactagaagacatcattttgcctttggccttttataaatctcttttgctctttctatgctctgcttgaacttttatatctataaaaacaaaccttttggctaaatattatattttatctgttagtattttgccttctgtattaagagaagtacttcctgtgcatataaaagcctttctgatcatggaggtttacatagctataaaaataaaataactcataattatgaataagtctttatgttaagattaacatcatagagaagtcctgacacttcatggcatatcatgaaggtaacagaactcaagagaaggtgactttgaagaaaagagtcttcttcctctgggttgctatgaattttcttccattgcctgatctggcctactttcagcccacttgtcaaaaagaagtaaatttcactaattagtgaaattatcttccaaagttaaaaaaaaatccattatactacacctacttgtttcttccacaatataaagcactgaatgcttctcacttgggttagtctcacagcaccaatagaaaagaaagaatctacttgcctccaagtcagtggttctgtcaacaggagtcaagcattatctgttcagtattcaaatgtatataaagctaagtactcaggctcttggagctgtagctgtctctaggtagacctgtcatgttggctcattttgtaatagtaacataaagataaagtcagccattgcgacttactgttttgcttcctttgtttctgggtggaggtcaaaggataacctgaagcagtggatgctcatcagactcaagtgcgtttgactcttttttgtttcttttctgtgcttggtcttgagcccatgccctttaactaggtcaggcaagcactctaccactgaaccacatctacactatctattatgcctttggaaaatgctgggatttcacagtgcacattataatcaacatttagtccccaccgtttgtgttctgacactcactttacagtgggtattttgaggctaaaagaagtgctcttgaaaaaatgaatgccttggtctctcactctgacagtaggaagaaagaactgtcctgaaggcaaagcagatcacaggagaaaatggaaaagattcaatttcatctctgtgacagttttatcatcttggcacaatgtataatcagctgggaagaaagtctaggtggtctattgtcttgaccagtgtgttctctgggtttatctgtggaggattatcgtgatgatatattaatttatagggtagcgctaacacactgtgggtagcaccattccttagacaaggattcctagactgagtattgagtgtaagtacagagttagaacaaagcacaggtaattgtgcatatggtcattgttctgtatacttgagttgcccgtgatagtaccagctgctttaagctcctgccttgactttcttgcaattaaggactgcaccttggaactgtgagctacagcaaaccctttctctcttcagtaggtttttttttttgcttttgtttaattttgctttgttttgttttggtttggttttcagaatactttatcacaccaaccaaaacaaaacaaggatgatctcccagctccaatcaggcaaagcaccattttcctctggagaacagggttagggttcatttatgaatgaccagaatccagaaagaggaaaaagaaaccttttttttttttttttcatagcagagaaatgacttttcactcacaggaagttccttacagagtaaaattttcatatgtatacagatgttttacacatgcatacagatattttacacaagtatacacattttcttaggataatatgaggataaagaaatggtattctgtgcatcagatgacaaggtttctaaacaaatgtgtcaggtggaggacatgtatcttagcatgaggccatgcagtagatgtttaccacatttagttttccttaacaatataacaacttattaaatcaatgttttctaacagaatttccacattttggatctattctctaaaacagaagttcccaagcagagctctaattgtagatttatgtgggagaaacattcaatagaagtcccaccctcaaaactctaataagtgaagaagcagagaaaccatttaacaatgtttaaggcaagcctttccaccttgtaaaatgcagtcatatttgctaccctaaatatctacatcaaccttaggagttggctcagtggacagttctcaaagatgtttctcttgtcaatttggagggtcagatatcagtgagagacttccaaaatccaagataactgtacctaagaaatgatgttcaaataagcatacgcatgtacccatgcacatatatacagctacacacacaaaataaattattactgtgggaaacttaggcatcacagtgaggccagagcaatagctgtaataggagataagctgggggcatccaggttacagcagcagtagtcagccaagcccatcctcctcttttgcagtatctaacagcaggagtctataactattcatttttctagagtaataggaacaattacttttatttacattttaaagtcttaaccatgtgaaattgtactatcatggctaagtatatatgtgtgctttgttcaatctcagcccatgttttctcaaagaattgatgatctcaacaagagtggaggtgctgtctctctgacaggagatttgtatttcgtattaagttaccttcatcgtttagtgttgaagacaagaataatttccttaacaaacttcaaagatatgatcataagagttgtggaacaagaaacagtacaggaccaatcaaatatgacagttagctatgcttgaaacagccaacaagcattccgttgactgttccagactttgaaaagtgctgtagcttcaacatttgaatctcctttctgtgtgcacagtaaacattctggctctctgtaattctaactagcccgaactgatgcttacactttccagataccagctgttgaagcagcaactttcaaacaattttgcagatcggcaaacacattatatcattgtgcgtgttgcagctgtctcgctagttagcctggctttgcattttggagagtaaccggtgcatagttacagaagagtatttgttttcctccagcagtcttggcaattagcacttccctagcttcaatttttcttcagtgcaataggtaccctgtgttgtgaaccattttataaaccaaggtgatggcatacacactgaaaaaagtaattactgtatccctctgaagagaaaggaaaaatgttctcttctggcttgaatctttattctctttttcaatttattttgtgtatatgggtatatggagtgtgtgtgtgtgtgtgtgtgtgtgtgtgtgtgtgtgtgtgtgtgtatacacacgtagaaaccaaagatttatggtacgaatcatcctttactgttcttccaccttctttgaggcaggaaatcctaataaaatccagaatgtacaggtatggttagtcttgttagccaccttactgtaggcatcctttctccaccatcaaagcctggagttatagatgatatgttatgaccatttaactttacatagttgctgtcgtccaaaatctgttcttcacatagttgcagtataactgctagcctatgtgtatttttgaatgaatttatcatgtatttaatcattaataattgaatgtttcatatatctaaggaattgttttcacattaattgaatattaactgacagaagtcattttaataattactcatggatatggaatttgttttaaggaccaccaaattgcatagcttaaaagcagcatataaacctaaggaaagattaggttcagctctaggatatctcccagaactaagaatatatggggtagacgattgtgttaaagagtttgcagtgaaatggtagtgagatgaatgaaaatctcttggagaatttgtaacagggtaataccgaggccgaagtagtgtccttaggaaaagagaataaataatatccaatttacctggtatagaaatccaggaaggatggtggtttttagctatgtgcagtgtgttagcaagaagtttgtggaaatattaagtcttagttactttccttgtgaatgtctgtaatctaatatgtagctattagttagagaatgatagcattttagagcctgaatacacttaattaaattgcttagtttatgatataaaaatgaagtcttgacaattaaacactttgataaattgtgtgtgtgtgtgttatattcaaatgtaaatgtgcctgtggtatttttgctgaggccttaatttgatgtcaggtgtcttccttaagccctggtcactattttgtttttagtcaagatctttcattaaagcctcatacttacttttccaactaggctagctggccagaaagtcccagagatatgcttgtctctcctccctccaggctgggaatacagatgtgtacatctacttattacataggtgccaagaatacagcatcaagtcctcaggctaacacagcaaagatataacctactgggccatcttcccaactccaatcttgctattaatcttaaagctagttagaagcaacactaagttcaggattctcatctctgtaagctttgtgtctcttctccatttctaatcgattttaagctttattaccatcatcatttagttttgaccacacaggatggagtagaataatctcctttaaaataattattagttgttcaaacaaaaaccctagcacattgaaaggcagagcctctggccctttgactttgagtgatgctttcatttagatccaacttctgttttatattctgtaactaccacacttgtccatattactcactaagcaagtattgatcaccacttctgtttcagagaacgtaataggtgctttgtgagaacactgggacacaagctgtccttgaggcttttgcagaataggagagatgctgtgagggtgagatgagacatagggggatctgcaactgtaggagccagacacccagctagttcttggcacaaagagcagccttggggagcatgcgttttcctaaaagtatggctgatattacagtttgaattgatctgaaaggtcagatggaagaccaacttttcacagctatagagacagcatagctcatatcacagctattgctagattctcctgatttgtctcatacatacaatctgaaatcgtttctgagcttggccttgtgcaagaacaatggattagctggcagaagagcaagtgcttgtagcttctcaaatatctctccagcctcttttataacatcttaattagggattctaaaggtatgagcatgaatcacatatgttgaaataattcgtatatgaaatgtttgagtggaattataatagcttttgttatatttttaaaaagcatggcagaactattgttatagatttgctacattaagttatactgtagtgatcagaatcttttaatcccttatgcatgtgtatatgtgttcatatatgtttgtaaggtatgaacatggtatcatgtgtgttaaagtcagagaacaatcttcagtgtcagttttcatcttccatattgcttcacgaaatttctttctcctgatttttttcttgttggtgatgttggttttgtttgtttgtttgtttgtttgtctgtttgattggggagtggggttgctgctgttttttcatatacattccaggtaattttctgtctctgcctactgagaatgggcagtccctaggattctctggttagccagtctatcctaatgagtgagccctaggccagtgagagtgattattttcaaacaaaaaattgtaagaaaggcctgaagaacagcatctgagactgtcctttggtttctaagagcatctgcacatgtgcttgagtgcatgcgtgtacgcttgcgctcgcgcgcgcgcacacacacacacacacacacacacacacacaaaatatataaataataaaatgagaaatagattgaatgagccaattaccttttctccttatatttgaagggagagagacagcgaattctttattcaggtggtttccccccccccccttcaatttcttattcatttcccttaacaagtgaatactagttaaagctatttgatgttctgcttaagtactcatgaacaagacaggtcaaaaccatttgatgggttgagttaacagtggactatacaaaggcaataatccaggatacataactctgacctttatctgcaattatttctcaatgaagctctgccctactgatgcctttgtcaagtacctgtactttatccacaaatgagctaattctcaggttgtaaggttaatctttatctatgttacctttaaactaaattcttattgttccctcaggcactttagctctttagaaaacaggttgggtggacttctattctgactctgttatggcatgacccctcattacagactgctttgaagatgtgaggcagtttaatctcacgtaaaaagtatgagcagtgcctgccttctggaaagtatcagccctatgaacatgacatgcactaacagttctccttttcaagagaaatacatactaatcattgacatcacagagccttttttagcgtggtcaaaatatttctttcagttctgaatctttctagattcaacacatgcttccacatatcttttaaaagtctgttatactcacagaggccttacatctcttagcacatgaaacagcatgatgtgtttggaaggtcattgggtgtttaatggaattatcaactagttagcatttatatagtaccaattttcttcatggtacttaacaggagacttacatttatcatatactaaaattcctcattactatagtgtctaacaggctggggagatggctcaggaggtaaggtgcttgtgaggatctgagttttgaacttcagcaaccagacagaagttgaatgtggctacaaccccaatgttggagtgcaagcagagacaggaggatccatggggctcgctcaccatcatttcttatccaagtagtgaccttaagcttcgaaagaccctgtctcaaaaacgatgcagtatgagagaaaagatatccagcactgtcttctgactacatacatgaatacattaagtacacgtctacatgtgtactcacatgaatacttataccacacatatgcacacacaatgataataaagaaaatagtaacagggttacttgatactatctgcaggacatttccttcatctgtttttcaaatagatcagttatttttggcccatcttacttaactagattcagtatttcattctatcactgtgaaaatgccacagctatttacactgtgcttattacgtgtggaaccggaatggcagtttacttctttttcaaaatagtgctaaaaagtttgtggacaaggaagttaaaagtattttcttcttaggagtcagtggattgggaggagtgagatgaagtgctgtcatttgagcatgacttgactgtgacattcatgaagtcacggacattataactatttgtgtatttatgtccgtcaatagacagcctgtgtgctatccctacatattgtatgacctcatatctctgggcatgtggacagcactgattggagttagggttttattcataagattttttggtttttttttttggttaattttgtttgtttgtttgtttgtttttgtttttcgagaccgggtttctctgtgtagccatggctgtcctggaactcactttgtagaccaggctggcctcaaactcagaaatctgcctgcctctgcctcctgagtgctggaattaaaggagtgtgccaccactgcctggctattcataagtttttaaaaaggatatgatgctgggagattcaggatggagccactagtaagagatttattagagagtaagggatgaatataataaagatacattatataaatatatgaacatatcaaagacttattaaaaacattatttttaaaatatttgtgtttttaaacaaagtactaaatagtgatgcactcagtgaacagccctgaccaatttatattgaataagtaattccatcagttcatctagtcacaaatcacccccaagacaatgttagaacctaagttttaatttatctttaacctggttattaagcctaccccttgtaaggctgcagagcacaaagtataatgtaatcagccctagagggagatggtttctataaggttaaaaaggccatctgagtgagagctcatgtcatttattttatctttatttttatgatgcaggtctaatgtagcaaaggaatgaacttgaacctctgatccttctgtctctacctccaaagtactggatgagagacatgtgccactgtagttgttcaaatagtgttggttcccatggactcatgtgtttgaagacttggcccataggtagtagcactattaagaagtgtggccttattggaggaggtgtggccttcttagtggatgtgtgttactgtggaggctttgaagttttgtttatatgctcatgtctggccagtgtgatctagagcctcctgctgtgcacctgcagaagacagtctcctcctagatgcttttggatcaagatgtagaacttatcactcctccagcgccatgtctgcttacatactaacatgcttggcaccttaatgaaatggactgaacctctgaaactgtaagccagcaccaattcaatgtgttttataaaagttgccttggtcatggtgtctcttcacaggaataaaccccaaatgaacagccactttccctcatttgtatggttctggggatagatgctaggaaaatcctgtatcaactgagctatgaagactcattttagatacaaatattcaggacatgacaagatagcacacattttcatttacacgttgttgcccattacgtgaggtgtctggaaataggtagcaacagttctcaaagaattgatatgaactggcaaactcaagcctactgtacatccttttcatatctctcttatccacaaaaatactatcactttacccactgtccagccacaagatgaagtttatggtagtagttcatctttgcagtatcagtcagcctttgttttgcctcaggtcttcttatatattctacatagttcatggctttatcttgactgatcacaaacagttcacttcgcttttcatgctaaattcctctctttgtgtctgactcatagaaatgtagcctcagccatcctttctggcaaagttttgtttaatgcacacatgtatgactaagctgggcaaatgtgagccccccccttctttattttcttgggaaagagcaacctgtaattagtcacatctgattatcctttggttctctttgcagttttagtaatgtagctacctgtttccacgtgcccacgcatgtatatatatatatatatatatatatatatatatatatatatatatatatatatatataggtccatgtattactgtgatctaaatggatggaaatggatgcattacactgtatggtgtgcatacaggactggtacactctagtgcaaaccctgcttagcagtatctagaatgctctagaatgctttcattttaattgtactacaaccactacctagacatggtcatgaagtgaataaactgagtcagattactaacagttctaccttacacacaaataaccacagaattcacagtgttcttttgaacaaaagtaatgtgaaataaacctggtaaatggcatttgatatttgtaattgaatttttgaattctgttgtttggcaaggcagcctttcagaaatctgagttgggaaggaggcctagacaggaattataacatccaggcaaatgtggctggtgagcagggaatgccgtgcagactgagaactgagaacagttgtgtgtgctgaatgaatgggagtttggtctgtgtgccaagtcaacgtaaggaataaaagcgacagcacatgaagatggtttagtgacaactctggctttcagcaagttgatgaaaagcttgattatcctaattctgtggctgctacaggcattcttttgggggttaagcagacccaagagtattacctcatttcccagtccattaaagggtttgaaattgtttcacgctgtagatttttcagtagacttttcgaaatgatctctgtcaacagaagttatgtaaagatgcacaagctcatttgggattcattgcagttcagctgatattgagatgcatcgataggagagtattgataatacttcattggttatgtactgaatgtaggtcctaattacttaaaacactaaacatgattacctacaggcagtgcagagttgtttttgacttcctttaatctgtgtatatgtgaatgaacatgggcaagcctggtcatgtccatgtgtgcgcaggtatgcatatgtgcatacatgaggaggccagatgacaaagctgtcatttcctaggcattgtccatcttatcaaaacaaaatttcttactagcctggagcaaatagactagattgattggccagaaagtcttagggatccacaagttttcacgtcactgggattatcctgattattcgttggtcctcttttgtaactgtaataagttcacaccactatggttgatattttcttcctgggcgctgggtgtcaaaatcaggtcttcatggttaatcaggtaaacactataccatctaagctccctcctcggcctcaacttcatttttttctttttaatttcatcacattcagtggacctatactgtttctcacatgagattggatcctagatctaaagctgcagaggacttcaagcttatttctccatgaacttgaacaggcagtaacagtcatacagttcttccctcaatatgttctttcttccttgatagaactatgatcctagacattcttctgcctccaggtgttcaacagactctttctcaggcttccttcatttgctgtcctgtgtatcttccctttctgagtcctctactttgctggtagatagactgataactatggtatagaagtgactgtattaggtgcttgttgtagaaaatatttaatctcaaaccagagtttctattctacttttgatcattcagtttccagataaaagacacacaatctttatatttataataagcattaatcagcactagaggtgggcagatatctagctctaagctattttgtcttcttccctgataataacccaacaatatgacctgttattttctgtcagagctgctcttaacctcagttggctagccctcatagataggtttcacctcatggcatctcttcccctctcttcctttttctcttctcttcttgtggcctctcctcatactccaagcctggacaacaaaatccctgcttatttcctgcccagctataggctgtcagtatttttatttaactaatgattttaaattaaagagcaagatcactttttttgagtatttttttccttttattggatattttcatttacatttcaaatgttatctcctttctgggtctcccctccagaaaacccctatcctcctgcctctatgagggtgctcccctacccacccatccactccctccttcccaccttggcatcccactacattggggcatcgaaccctctcaggcccaagggccactcctcccactgatgtaaaacaagaccaccctctgacacatatgcagctgaacttctgtgtccctccatgtgtattctttggttggtagtcctgtccttgggagctctgggggtgggggggtctaacctattgaaattgtcgtctccccatggggctgaaagctctctcagctccttcagtcccttctccaactcctccatctggacaaggtcacatcttatgtgcagattctcttgtgcctgtgagcaaccaggactaagtggccaatatttagcattataatacatagcaaaagactaaacctcagcaattacttgtcttgttgctgtatcaaaatgcctgactcaagcaaccaaagaaggaaagaaggctttattctggatcagagtttgagagtgcagtacatcatgatggagaagtcatgatggcagaagtatgaggccactggtcttatagtatccacagccaggaggcagagataaatggataatctcttgtttgcccagcctttctccattttattcaatgtagtaccagctcattggatggtgcccatatatgaagtgactcttctcacatcagttaaagcatttagaaactcactcacagacaggcccagaggtgattttgtacccatggtgatgctgaatcttattaagatgataatcaagattaatcatcttagtgatttagatcgggaaattcaagagaagaagttgtaacctgctattacccactaggattatttttaaaatgtgtttttattacataaggagtaattatagtctatttctatagtaactctttgatggatgtttgtaatgtcagtatccaggactatattagaagaaacacctggtgttataatctctgctgacaaatatattgcgcatctgtttgtgtgtttccaaagagtaaattcagttattggatcaaaatttcaaaagtattttaggcactggaaagatagcttaggagttcagtttaatgaccacccttgcagtggaccagagtcaaactgtgcatcattcttccaggaagcagaggcagtacacatgtgcacagaaatgcatacacaggaaaaacacaaatacaagaataaattcaaacataatggaatgtttaatttcatagtagagctactcaagttattttcttcaacaatagaattctttgtattcgttttttcgagacagggtttctctgtgtagccctggctgtcctggaactcactgtctacacagcccaggctggcctcaaactcagaaatccacctgcctctgcttcccaagtgctgggattaaagaaaggtgtgtggccccactgccctgcctcaacaatataattttaagttactaggtcaacatgaaaaagagaaactataatgaaattggccacatgattttgatatttgcaaagttcatgcaaacccttaaattaaaattaaaaacagacgatgtggcatcttgtttgaagtttggagagagagagagagagagagagagagagagagagagagagagagagattgagggagagagagagagagaaagagagagagagagagggagagagagagagaaagagagagagagagagagggagagagagagagaaagagagagagagagagagaaagagagagagagagagagagagagagagagagagaaacaccaaatatatcttctaacatctatggtaaaaccaaggtacttaaaagtttccaaacttttctagtgtacatagtgtatgtaagcacagcccaagccatgctgttgcacagtaacaacgacaactacagcatactttctaagtcagacattttgcaaggtgctcttgattatgaagatctagttcacatttccactatgaagctttttatgaatcttcataactagaagtacaaaataaggtaacagttgtaatttagttgtgagtcttaggtccattataaaacagatccttggccttaggttaatcatctaatggctttaaattttaattctcccatcttcaaagtaagtaataagtatttaatgtgggtttgtcttttctttgtgagtgttaagagacatgcaaggataagacataaagcatgtttgtttcataggcatcactctcagatactaagtctgggtttataagcaaggaatatagctattaatttagagactaaagtttgcatatgtgtttacaggtttctatgtggctaggtttgggttcaatatcaataatgtcttcaaacactctccacttcatttcttgaggcaagctctctttcaggttgaacagggtattcttcaattcaactagactgactgaccaataagctccaggcatcctcctgtatcatcctccccagaattgggtttataagtgcctggcatttgcatactagggagagattggtctatgcttatgtgagtgagcagcattttacctgtagcgaagtctccttgatacacgctttaaatattgacttgtatttctcccctgtcctgtgagtgagaatttctatcagctgatgtttcctttattatctgacactcatcagagacagagcaatgggttaagtcttttagagtaatttaatgaagcattgccttttcaatgtcaccaaagtgtgttgacagaatagcatagttaggttctcagcaccatgtcagatagttcataaccaccttgccagcttttgaggatctaatacttacttctgccctacatgaattcttgcatttttgtaaacacacacacacacacacacacacacacacacgcacacatttataactaaaaataaatgtcaaggatggaccatctagagactgccatatccggggatccatcccataattagcctccaaatgatgacaccattgcatacactagcaagcatttgctgaaaggaccctgatatagctgtctcttgtgagactatgccggggcctagcaaacacataagtggatgctcacagtcagctattggatggatcacagggcccccaatggaggagctagagaaagtatccaaggagctaaagagatctgcaaccctgtaggtgcaacaacaatatgaactaaccagtaccccggagctcttgactctagctgcatatgtatcaaaagatggcctagtaggccatcactagaaagagaggcccattggacaggcaaactttatatgccccagtacaggggaatgccagggccaaaaagtgggaatgggtgggtagggaggtggaggggggggaggatatgggggactttttgggatagcattggaaatgtaattgaggaaaatatgtaataaaaaattataaataaataaatgtcacttagcaggtggacactgggtttgctttgacaccccccatcaccatatctaagccattggatctgcatgtgaagccaaggtcttttcttactgttcctttggtattctctacagctttgaagtgggtcattttccttagtatctctttatatggtagcctgctctccaaagcgcacttggaatgtccaccttgttctgctgttgctctctgatctccttacttactccaaacgtaactccagcatcaccttttctaacacctcagagaggttttagatgagccttagctggtccatggtgatcattttcctagtggtggagacataaatatcagtcaaaagcagcccaaggaaagaagtgtttattttggtttacagttcgaggaagtgctggtaacagtcagtcaggaagtagagggccaacaaagaatgaggctggattataaaaactcatagtgactcacttcttccaacaacgctcccacaggtcccaactttcctaacaagtctcagcttttcaaaacagctctctagctctaggtcttctgtctagctgagaatgaagtgttgaaatccatgagcctacaggggatgtttcacattcaaaacttaatattctttgtctactggccatatgtcccataaccttcactgtgtttatttgttttagtctctgacccaggagattgtattcttttcaatagcagatgcagttttgtgatttaattatgaatgtcttgccagggaaatacttagtatttctgttacaggactcagtaaacacgtgttgaactgtaatttttctgtcttatatcagctacttgacttacatccagaaggataccatgtgtatatttgtatcccagcagccatgtgtaaataaaaaattgaactctaaagataaggagtactgaactaaatttttcagaaatgtatgtaaagagaatttaatttatttctggcttttattagattttctttgtgttgttctgttttcattatattttgtttatttatgcattttgtatatgtataagagagaaagagaaagtgagactaagaaagagagagataaagtaggcatctagaactattcaaagtccttcatgactttccagtagcatattaacttaagccatcaatgaatgagatcagaactgccatgatctcaggacctatcacttccaagatgccctaaatctgaaccctgctgagttgtagacaagcctcttactcataaaacttagaaaacattttaaagccaaatattggtgatttttgtgatgctaggtattagttttacaacttctcaagaactggaccggaaggtgggtgtgtggacatgctggtaggagattattgtgattgctttaattaagtgggaagatacactcacattcactagttacactcaggactgtaagtagaaaaggtgaatagaaatgcacacacattgctctctgtctcttgcttatggatgtgataatactatattctataagcttctgctgcctcagtttccccaggagaaggaatgataacttggactgaaggccagaataagccctttcttccttactcttttctgaggattttatcttaacaacaggcaaaaaaactcttagccaatttcctgtgtctaatgtctgattccagactatgggatttctgaaaatcagttttatgattattagattttggactaaaatttgaacttattaaatgtatcacttactaaagtactaaatacatgatagcttttattatgtgtttttagcaagaagggtcattatcatatatttcaagggatgtcatagttaacctatttgcttcagtagcataaatcttagtactcactacagcttcccaccaaattttgtggagtgcttcctactcaatagactcagtgttcatagataaaatatatttatctaagtaaataaaacaattattttatattttgttgatatcaataggagtaaacgaggttttatttgaagaaattattttttaaaagatgaaaacaatctataaattgcttatattttgtgtgtgtgtgtgtgtgtgtgtgtgtgtgtgtgtgattttgtatggcatggcatgaaagtgaaggatagtagacaacttaagagctcactttctcaacccgtttttttttttttttttgctatttttttgtttttgtttttgtttttgtttttgtttttgtttttcaagacagggtttctcagtgtaaccctggttgtcctcgaactcactctctagaccaggctggccttgaactcagagatacacctgcctctgcctctgaagtactgggattaaaggcgtgcaccaccactgcccggctctcaaccctttttaagcgtcccaagtattgaactcatgtcaccaagcttgcataacaagcactgagccatcttattcctttctctgaaaactcttccttccaaagtaggtacaatgtagtccttgctagatttctctatatccacaggtttaaagggaagaaaatttggtatctaaactgaaccctatgggaaaaaatgttatatttattttcccactttccattcatggtggaaacatatttctttatttacttcatgttttgaggttcataatcacatgattacagattttcagtattgattgtaggtatttttccatattttgtttactttaattaaaggacattactctataactccattcttaaattgagtctctctcagcctatttttctgcagacaagaagctgtttcatggtgaatttcaagtatgttcaatttaaaatgtgatttaggggttcaggagtaaatcctaacataaacattaggacctgattttggatctcaagcactcaccttaaaaccatggatatccagtggcacatgactataactccaatacttgagaggcagaaacaggaggatctatggtgtttgttgggtagtcattctagcaccaagttaagtgggaaatcctttctcaaaaaaagttagagaattcaagaacacctggatcctccacatgcatgatcatacacttgcactcaaatttctactctctctctctacacacacacacacacacacacacacacaaagctaattaaaagttatcctccagatcatcacatatagtacttaacacaatgatctttctgtagcttgaaatcttatcctaaattatgaattgtatgttgggaaacagtaattaaataagtaaaacaactgcaggaattatcaactgtgaataacaggagaataaatctgaagaaaaactcaaacacatttgccttgttttttttgttgttgttgttcaatgatgatttattgaatacctcttatattaataacaataaaagtttggctaggaagatagctcagtagggtaaaaccactgttacacaaacgtaaggactcacctcaaatccccagaacccattgatagggagactcacgtggtagtagcctgctcatgtctgtaatctcagtgctgctacaggaagatatggtgtagagacagaatttcagggcaactagtctgccattccaagcagcaaaggagagactacacactggtaaacagagatctcatctcaagcaaaaaaggaaacaaagactggcactggtgatgttctgagcaccacacacatgctatggcacatattcacctctcctctcccctcacatgattcctcatgggaagtaggaatggctggcattttcactccaagctatcagtaaatagaaatgttggagccagttagttacctttccatactaaagtgtgatacttgataatgagagtgattgtttccataacaacaactggtatttctgagtcctctctatgatcttctcaagcacctttcaacttcatttgagttccaccccatcaaaactgaagtccctatttgaagacaagacaaggaccctgttgcccagggagatttaatgccagttgtccttggccaggaaggaagagctttatactaagccaggctctctaacactaatccaagctttgaaacattattctacattcctttctttgtttggtccatcacggtttctatgtggagctgtcaaaagcatggccattagcatcaccaatgatgacttttatgatgtgtgggaaatgcaaaataaaaatgacgcagtgtatttccaattagtgacctttagagagctttttcatttgatcttgcagaggaaaccttaagtttaataatttccaaggagaaataagttcagtaaggttggtaccacagagctgtttgtttagaaatgaatatacgtaatgcagacatataatatcctgcacaaggaagctgtatgtcacttacacaaatgagcttgggaaactattatttctgcctaaactttgagtttatctaactgatgtcaagaataagaccaacgcatgtgcttattcttgagagattcaaaaaggatctatagtgcagtcctcaactaggtactaagtatactttgtagttcatacgacttatttgtaattatcatattcatacattcacatgtgcattttatatgtacttataaataatgtagtcatatcctatttatttatatttaactaaaatattttatagtttataaagtagagaaccacaaataaactcaattaattttggtctcaaaacaaacctagtgataacatgttctaaactgagttgcccaagtgcaatatatactgaatatatatttcaatgtgttcagtgtgtgggtttcttcttccaggtgttacattttgtggttgttgcagttgccagtttgttaacagcattacatagtgaggctcttttctgagaaaatagatatttttatattttcttaaaatattagtaatctagcaaccccaggctcacatgcatgtgtgaatttattggctaaaacagattcatctttaaatggggatactctccttagcatcctgtagtcactacctggctcacttcatgcatccaaatcagcatatgttaatataaattagcatatgctaatgtggatccctgtaagactatactctaatgcattcaagaagggatcagcaaagcatgactcacagagccagtgtgtttgtaaatgtgaactaaggatggtttagacattttcagatggtaaaataaaaaaagggcatgacataaatttctataaacaacactatcaggcccgcatgtattgcacacttttgtttatctctgcttctaaagtcagatctaggcaacaaaagattgcctgaactaaatgttcatttctaactgtttgtttgaggctgacaaatgtgttataaatgctaagtgtgactaagcaatgttattttcagtctgggctttggacaatttcttcagcagtcctgtctcagctgaaagaagaggtaatccaatgactttctagatagtatatgttttggcatgcaccagaaagcaaattcagggcctggggagataatttatcgttactggtaaaatctctaccacaaaagcctgaagcccttaagcaggacttgaagtcccagtgttcatgtggtgaaactgaacatggacataagaaaaccccagaagcttatgggttaacaagcctggcatacaattcaatgagccacagacataattctaaacatggaagagtgtgaggacacatattaaagttgtcctctgaccttcatacacacacacacacacacacacacacacacacacacacaaaataaagaatgaaagcaaatatttaactgtcatatagattactgtgcatgttagtctgtgagggtgaagaccctcaagaagtctaaatagataatggatatgaatgaatacaaggaacctagaaaagattcagtaatgcattagtacccaagcactgaaacacagaagaaacaaagtaaatggtctgtgttcaccagccaaatggagccctgcctgcttcagttgatctgagactcataggctgtaatttctgctttagagtcatgatctcaatgagtagggtagaaactatgtgaaggcggtttaatccatctccatttcataaccaactgaagaaatcaaaataaagtccacatttaattagttggccctgagacacgcactttagcacctagctcttccaatgcaaatttagggcacttttttattatatcctctgtgattccaaggacatttttcccctgaagaaactaataaaaatcagttgcctgggtgattctgagtagcatactcaaaggcaaaagtctagcatgggtaatcagtttaatgaacatttataagtcgtaattgtaaatgcattttgactcatgcaaatagatgccatatatctgccaataatctttcaatgtcttaagggatggatgttgcctggggaagattctgcaagcacaaaagctgctgaattatcactaatactcaaaatagatcagtgtgtgtgtgtgtgtgtgtgtgtgtgtgttgtgggggaagagagagacagagacagagaaagtcagagagacagagagagtcagagagacagagagagacagagagagacagagaaagacagacagacagagagagagagagagagagagagagagagagagagagagagcatgtgaaggctataggaaggctatggggaaagccaagttaactaagatttttccctccagaaagtttaacttttgcttacaattttaaacttaacagagtttatttgaattttttaggtcaccctgtcactatgctttattaacatactcactaattattatacgatttttcagcatagcagatcagatgtatatgtatgtgctgcttgattgtatctacttgggccataaaacaaaactcaatcagagcctggatatttaaatgtgttctcttaagtctagaaaattaaggggaaagcaggaggaccagaggggaggggtagggagaggataggaatacttaactgtgtaatagtattcagtatttgcgagagctgaggactctgagttaacgctctcttgactttttttccttacagagacttggagaagtaatttaaattttgaattcaagaaactgcctagaaataaacttggcatataccacaaagcatatgtaccaaagaaacagaatattagatagcatgtataaaagcttttcaagaaaacaaaatgagcaagatgtttaataaatgttgattgggtggcattggatgagtacttctgaaaatagagagaaaactatgctaaaaattatgaaaaacaacaacaacaaaaaagagctggtaaacattcttaacaccaacaaaaacatgcttgaagcttttagggcactctgaaaaatgaattactactgagatcagactgaatggggggggggaaattagtaggcaccagcttacgacttctatgcaaatgatttctcatatgcacagagatggtcctgaatattgctatgccaacaccagtcatggaagttagaaacaagatctaactgggttagaaccaagacaaaatgcatggtattgacaaacagtatcagtattttgggataccaaggaatcatttaagatgattatatggaactgtttatcttaatattaaagcagtatgcatacacatgttgcatgcaataaacattagctgagcatttgtcaggtattagaccatattacaaggaccaagaaccaagaagcccaagcaacatccttaaacagatgatccaatgaatgggatattgactgccattgtttcttttcctgttgctgtgataagacactatgacaaaaagctgcttaaaggtgaaaaggtttaatttggctcaaaactgacagctatagttcatcttggttagggaggcaagaccacaagagcttgaggccgctaataatgttacttccatttgtggaaattgagagctatgaaggcatgctccttcttagtcctctttctcctttgaagcaatccaggatcccaaccagggaagggtaccactcaaggtaggtatgtgcatcttcccatctaaatgaatactatcagaacactaacatcacaagcatgtctgtaggtttgtctcccaggtgcttgttgattttgtgatgttaacaactacacggatattaatcatgtatacgtgcaaattgaaacatttatgtttataactgtgaactccctctgaaaataaatgtgtggctttgtgaaagaatgcaaaagtgaagcttttctctggggataatcacaactctgaaagatgaagatattatgagctgattctatgaaagtgtttatatttccttgcaattttcttgaggcacagtggactcatatttttgaaactaatgtttcagagtgtatggttgattgccaacctgagcaaatagaacaactgtgaacaaagtcctgaactctcatatagtactgtggcaagcaatctcattctcaggtacaaaatgcttaataatttagaaatgacactctactgagttctatctgtgctggagtttattaaaatgctcattttgactaataacagttgtatcaagtcagtagctccagtagctgttagaagagccacaatttaattaaattatctggaaggggtaaattgatttcagagcaaaatcacttctttcaatttacctttctagacctccgattttacttgttaattgagttacctttgtatattgaattgtagtagttaacactcttcacagtgtatttggtaagacaaaacaagaatctccaaaccaaggcacataagttttgactacagacataaatatatgtttcatatacatatgagggtagaaaccatgtaaattgtcctattactaggatgaattatttgctagacaaagtaacatttagtattttcttattatgaatagagaaaaaatgagactaatctacctagtatctaattttatattcttgtttagtgccatttatgaagtgtgcaattacttctttcatctcattataaattattaaacccatactgattatattatgtagacatatcaggaatagaaatttaaagtgctctttaagtatttatgtgtgtgtgtgtgtgtgtgtgtgtgtgtgtgtgtgtgtgtgtgtgtgtgtagtgcttatgtgcacttgagctcaggtatgcacagataccagaacaagaatttggattccttaacactggagttaaagttgactgtgaactgtttagttccggtactgggaacttaattaggatcacttggaagagtagttcacacttataactgttgcactacctctccagccctaaggcattacgtatttaataaaaattaaaaaaaacaacagtgtgtgttcctctcagtgcagattaatgtatttaacagtaaaataaccaatgtgaagttgattttctaaatacatgaaatcatttagaaatatttatgttgaagtataggaagaagctgaacacctcagctggaatacagacaattcaatttccttttgtccttgtggaaaatgtttggagatactacacataaccatccattttagtgaactgtcatgagtacttgtatacagcaatgagtacttgtatacagcaatgtaatgcccactataatgaatacgtggggcaggtcctaaatccctctttgtctttttcttactctctgcttaattcaaagttcttagtagacagtgctgtttttttgtttcaaatggattttgctttccagattgtcatataagcaaatatgacataatatgttaatatcagtgcttgatacctttaataggacatatttgatgtttctctgtgatgcaaaacaccaataacccagttcctttaatcagtagatgctgtgtgttttaaagttagatcatagttgttttaggcattttatatttttatttgtgggtagtatttctgctacaaatatccacattctattaactttttattttctttttgtcagtatgctcttgtctatattaataaaatttggtgtgctatttcaacacacacatacatcacacacagaccacttcaggagatttattcatgtttcttcatatcatgtttttattattgaaaattttaatgtatattcctttataaaatatataattggctcaatttccctggcttcctttcatttgcgaatacatttgtgtagaagtgaatattctattatttttgttttttttaaagtttcctttgtaagacttatttttatgtatatgtgcacacacctaagtggaattgcttgtggaggtcagaagagggtgttggattccctgctcaatatggaggttatgaactaaacttgggcagtctgcaaggggagcaagaactgagccatccttcgaggactttactttctattagaacatgttctagtaagttcttagaaagaatgcacattctttagattctatattacttgaaagtatttacattttattggatattgggtttaattaaaaagtaatcacacgtggaaggattttattaaaactccaagattgagaaagatttgatttgcttctgtcttctgaaatactttagtttggggcaccaaattaatagttaaattggactccacacatgcattctaactttgattagagctagatacagaaaagataagtatttttttcccccatcattctcccttaaagctttaaagtgctggcaaatgctacacaaagacagcacatttcctgagtcttgcaggtatctatgtggatgtaggcacctgctctaagaggctcatatagatttctttgctgcctgctctactgatgttgtgacaataataatcttttgatatccatgaacagaatcacactttgcagattagtaattagagtctattgcctaacatgagctgtggatccttccatcccctttgtggaagggagtgctgaaagtgttctttctgatcttgtagacttagattaaacttcttgctgcctctagtcacagaatggaccttgactattttcttctgaatgaaaaatggcacagagttctatgaactctgagcataggacacaaactctaggcctagatttgataagttagagtttgataatttaacaggatgcttttaaattttcctatcagtttctttgtgtattaagttagtttgcagtgctctgacattctatggtgtgtgtgtagtgtgtgtgtgtgtgtgtgtgtgtgtagtgtttgcacacgtgcatgagtgaatggtgtatgtttgtgtatgtttgaggtccaaggaggacatcagatgtctttatcatgcttcaccttatttgttcgatacagagactcaggaaacatgaagcttggatggcaggaaggcccagagatgcctctacctctgccacacataacaattgggttgtaggcacataggcagatatggatgctttgtttttctcaatttatttatcttgctgagttatcattttgcctacacatatgtatgtgaaccaggtgtatacctggtgtcctcagatgtcatagaaataatgttttagatttcatagaatgggatggttgtaagccgtcatatgaatgattgtaaggaagtctggtcgtttgcaagagcaacaagtgctctccacttctgagcagtctctccagtctctgtgcctggtctttaatagggatgctggagatttgaactcagatcctcatgactttccccctttccaccaaaatcctgtcctcatttttaattatcataatggtgatgttctgattacctgttctggacatacagactcccagcattccatgtttaacagtataatatgtttcctttctcctctaaacatgaggaaagttgtcatgtagtctctgagaagaaaggcattcgcctgctaggaagtattctgggtattttacattatgctctcacaaggcaaagaagttaattttattccttttcataagcaccacaaaagtcctctaaaatgcatattgaatgaagtgaatgctctcattttgagctctaaatctgtgtacacattaatatttctccataatcataacagcagctgctgttgatccagtagtcattgtgtgctggccacagtgctgagtcaccattggctgccttcaatttcaaacatctcctcaggctgagagctcgttaactctagctgtgccatttcccatacaggacaggttgaatttcagggatgtgacatcattttatagtttgtgatacctagtaaaagtaccatgtctgaatcaccctgaaaacctaaatcctagctctgtgtagctttcttagtatttatttcattattgttattactactatgtgtgagtgcagggtttatatgccacaatatacatatgggggaggcgtccaagaaacacaagtgctttgtggttttacctgatgagctgtttcgatgatgttaaaggtgtatgtgtatacaaaatatgcgagtaaacttaaaataacaaaactaaaaccacaaaactaaccagagtatatcttaaagacttagagagaaaacaaaacaagatcaagtgataaaaggtgtatatgtgtgtgtgtgtgtgtgtgtgtgtctgtgtgtctgtgtgagtgtgtgtgaatgtgaatctgtgtgtgtgaatgtgtgtgtgaatgtgtnnnnnnnnnnnnnnnnnnnnnnnnnnnnnnnnnnnnnnnnnnnnnnnnnnnnnnnnnnnnnnnnnnnnnnnnnnnnnnnnnnnnnnnnnnnnnnnnnnnnnnnnnnnnnnnnnnnnnnnnnnnnnnnnnnnnnnnnnnnnnnnnnnnnnnnnnnnnnnnnnnnnnnnnnnnnnnnnnnnnnnnnnnnnnnnnnnnnnnnnnnnnnnnnnnnnnnnnnnnnnnnnnnnnnnnnnncaccagcaagtacaatccacagagaacctgccagcaatgtaaactttctatgttggcaagctctggtgggtatgaacttgaggcttatcctcggaggatctgactgtgtctttcctactcttggaatgattatacacattggctatgtttcatgtaggaatgtagtttctcatgtcccaactcccactgttacactgtgtctgctttcccatttcttccctcgtctttctgctaggtgtggtatcatgtggaccttaagcttggaaacctccaggtgaaagctataaatcagtgctgctatcagcaaaagggaatgggagaggccttcctgtatcacctcagtcttgaaaaaagagattggttttcctaaaggacaagatgaagggagtaaaaatggctgctttctctcacattcacttaccataacttgtagtatacagggcagcatttgttgtattttttttttttttgattcccacattaagaaacaatctatgtcacaatttttctctctctgcattcatacacatgtatcccaacacacacacacccacacacacacacaaggaaacagcctgtgtatacacctatgtttttaaaataaatagcatatggactgcaaatatggctcagaggttaaaagcactgactgctcttccagagatcctgagttcaattcccagcaaccacatggtggttcacaaccatctgtaatgggaaccactgatctcttctggtatttctgaagacagataaagtgtactcatatatataaattaaaaaacgatttagaaaacaacataaataaataaataacatactcttctatattatatgttcttcctattatctgtcctagcaatgtttaagtcactatttcatgatctactatactaatcatattgtctgacacagggcataaagtagaaaaagcactaaacattctatgtcacaatttcttttctcttggtttgccttgattgttcagagaatggttactggtaggcattgttgagtttgagtttattgagtaagttgaaatgagtaaggttactgagcatgtaacaagcagatataaaaggacaaatagccagcagcacacagagagaagcagcaggcacagcagagcattgtcaaattggaaggataattttctcaatatgtaaaaaaaatatatttttgtatgtttatttctctatgtgtatgcgagtacctgtggaggccgaaaagggcattgaatcccctaaaactggagctacgtacagttgcatgcctcctgacatggacactgggaacaaaactagttctttgcaaaagcactaagtactcttatcccctgggccaactgcccgacccctgagtttatttgacttcatgtatttaatgtgtgtgcttgtgtgtgtgtgtgtgtgtgtgtgtgtgtgtgtgtgtgcgtgtgtatgtgtgtgtgtgggtatgtgtgtatgcttgtatgtgtgtgggacagtattcatcagagataactataataacttgatcagtagagcatatgaagataccaaatacagcattatcaacaggaagttttgtagacatccaccagaaatctactagagaaatggagacaggcagctggagcttccaattgagctttccctacagagatggacttctcacttctctatgtctttgtggactgatttttattatgggataagcaatggtatgttctggaaatgttttcttctcttgatggtctaagagaccaagtatttttcaatatccaaagctacttgcttctcacaccccttagagaccaaggggcaacatgacctagagaaggggatttgaaaggaaactagagagcatgttctctacagtttacaagcttacaaggcacaccagagtttagcagcatagtttaaattatagtccacagttcagttaattatcaggtcattaacaagactttccaaaaaaatgatcctaaaacctctgatatcatatttctcaaatgagttgactatactctagtgtttgaaacatcagggacatttggagggaagagaaagagccattgtttagccagaccactttctctgtctctctttgtgtttgaattagggagagctctgtatgtgtatttgttattactgaacaattttatggttttccgtgagtatgatagtcatccaatgttgtctcttataaccaatttaggtgttaggagcatctttcaatgtcctttgtttgtttcttttaactcaatggatccaatccttagcaccacacaaaaattatgtgggtggtgattgatggtacacacacttgactcccagtgctggagaagcagagacagatttggcactggatcttgctcccagcatagcctccagcaggcctttgagatacccttagaaaaagatagagagactttctgtggatgacatatgagactgaggagtccctctgacctccacatatacatgcatacaaactctctgtctgtctgtccctgtctctctgtctcttcctttctgtctctgtctctctgtctctgtctctctgtctctctcacacacacacacacgcacacacacacacacaaacacacacactcccacatgcccacacaaacatacacagtacatccttattttaaaaacaaacttgaaatttatggatttaatgaatttccactatttttcacaatccaaaagtagacattatttccagtacttgggctatttttataaatgttaagttttaatattcttcccatcccaggaaggccttatattttccaaaagatgatcatgataggcaggaagaacttgacatggaagatagctgttgctcttaagttgtagctggcgcccccctgtggccaccagggtgagaacatgatcttcagactcaattagcttttccccagtttccttctttgtgacatgaaaacactaaggctttcctcgttttatttttattttttagcctttattgtacacttttaattttattctcagtgtgacctcttagatatctacagagaaaggcaaattgctgtagaaacgtctgtacaagaatgtgcagagaaataagcttctcctggcaggaacagtgggtcggatgtgcttactgagagcacaggctatttcatgtgcctctagaacatgagtagcatgagatggtggcacaggcaatgataaggatgtgacctcctcgttttaggtttcataaaataatattcagtagttactggagtgtccataggtctttgttctctaattatgtggaggtggctagaaagaagagtacttgtggcacacctgccatccaaacacttcagaggagaaggctgaaggagcaccctcagctgcatgataagttataaggctacacacacgtgcgcacatgtgcacgcgcgcgtgcgtgagcacacacacacacacacacacaccttgaggtcctacattctcagattcatgtttttacaaattaatgatgtaacacaatacgaatttattcagcaaacttgcttatgtagattttgcaataaccagtaacagagcatccatccctctcctcttcccactggccttggctctgtgtctggtaggaattttggcttgggcatctgtgtgagggcattagaagatcttcttcttgcaagtcctttacacttcccttggcatttcattacatgtatttgacttcatacaatacaaaccacttcatactttgatatgcaattgtgctgattttaaattaatcttctgttaatttgtggaacttggccaaatctcccaatctttctttgcttcagaaatttgtctggacaatggtgataaatttatgtcttgagattgtagtagagatattaatattcttaagacaaatccattggatggtaagaatatgacatgaaagaattgggaagcccatccttctcgaggctccagaagaaacaggagtaaaagctctttgcacacagactaacttagaacaggttgcaggatgctgctgttgggatttacattggtggtgttgaaccaatgacttttttctcccttatcctgagtttaattaaatttctattatataaaaacttaggagtttctttgattttgtttgtttttcacaaaaacggattttctggtgttattgtgatccttggatatcctcccttcaatttgttgtattaaaattaaaatatttatttcaataaatgccaccatgaaaaactcaggactggatatgcagctcagtgggaaggaagctggctcagcatggaggatgtcctgggtttgacccccaggactatattaactaggcagggtatgcactcctgtaatgcaagaaaagctaacaaggatgtcgcggggcaggataatcatttcttgttgctggtgagaacataagctagtgcagcaactacaaactgaaaaatacccagtgctctagtgctcctggctatgttcatctagaagtcacataagagtacaatagagtacttccatcaggatggaaggaacatttaaaaatgtttctgtatattgtctctaccatatacagaggttaggaatgcccctgaggtgagggatggggccaccaacccatctcaaaaatattaacccagcattgctcctgtctaaaggaaatacagggataaagagtagcagagactgaaggaaaggccatccagagactgccccacatggagatccatcccatattcagactcaaaacccaaatactattcctgatgccaagaagtgcttgctgacaggacattgatatagctgtcttctgagaggttctaccagagccttattaaaacagatgtgaatgcttgcagccaaccattggactgagcacagggaccacaatggaggagttaggggaaggactgaacgagctgaaggggtttacaaccccattggaagaacaacaatatcaaccaaccagaccccccagaactcccagggactaaaccaccaaccaaagagtacaaatggagggacctatgtctccatctgcatatgtagcagagggttgacttatctagcatcaatggaaggggaggcccttggttctgtgatggattgatggcccagtgtagcagaatgccagggaggtgaggttggagtaagtgggtggaggagcaccctcaccaaagcaagatggagggggaggggatagagggtttgcagagagaaaaccaggaaggaagataacatttgaaatgtaaataaaataaccaaaagaaaattttaaaaatctacaaatgaatcaaagttaaaagaaacatttatgtatgtataaatgtgacaaaggagatgttagaattgaaaatgagcacaaataactttatggtgttaaagaaagatctttgacacaaaaatggcctgctataatgttttgaataagaattgaccccttcagctcatatatttgaatgctcagtcctcagtaggtgaaactgggaaggattaaatggtgtggtcttattgataagaaggtgtgtcactgggggctgggctttgagatttcaacaggtctatgcaatttttagtgtctctttgcctggtcaatgtgtttgaagatgtaagctctccattactgctctaatgtcttacctccctggctgcctgactgctgccatgctccccaccaccatggtcatggaatcaccctctgaatctgtaaaccgtcaatcaactttctcttccttgtgtttctttgtttggggtgtctttgagtacataaaattaaaaaaaataatttatttaatatgtttgggtattttgcctgcctgcaggtatatataccataggtgtatctgatataagtggaggtcagaaactagctttggattctctgaaactggaattatgaatcgttagttgtgggtactaggagctgaatcttagtcctctgaaagaacagcaagtgttcttaaccaagttagttatctctccatccctgtttcccaattcataaaggtagcaatttttgaatctttcaaacagtatcagtgagaatgcattgtgcttaaataaaagcttaagaaatggatagaaaatgttagtcctgtatttcatttcttgtaattttgtttctactttaatgagcatagaaaaacacaaaaccaagtgactgggatgagttaaaggtacaatagttttccaacctccattccaaaggcacctgcttttccttccctcttgactataggtgatcaccagcacaaacgctgtgatgtagcacaagcatgcagctttgttgctgacatttgtatgattggttttggacttataaaagcaacaaatattaatgattcttctgacctcgttatgagaatccctaagggacaaacattaaaatatatccttaattgagtttatgattgaactgtgtaaatcattccagataaagcatgcttaaaaaaaatctgcttttattaatttatgttttttacatatgtatactgtattgaaaccttttcccatttctcctccctttagccccttctgtcaggttccactcagatttctgtcaaatccattgcctcattttcattaattacatgtatatatgtatatatactcacaattatgtacattaaatatggttatttagtttagtgttgattatgtgtatgctttgagggcttatatttggttttcgattcttctctcagcacttgttacgtgcttgtagctcttcacttaagggttctgcccagtgagcttttcccatcaacattggcatgtcaattgggattgtcattattcagatcctggttaggatcaatttgctgaaagttcctgagtgcaagtctcctgtcataaggagaagactctggtagaagatgtcctggttctctagctcttacaatcttcctattctctcttctatgatattctctgagacttaggtacaggaattgtgttctagacccatcagtggtggggctggatatcccacctctcaattgttctctgtactttgaccagaagattgttgatttggggtgtgagcttcactcacctctgggtgtaactgtatagatttagcgtgaatttggggattatagtggtctgtgaaagaaatagtagtaggttcttcttcagctgtgggtggttgtttatttttattttttaattaaataattattttatttatttatatctgaaaggttgtccccttccaatccaccttcacacacttcttcctccaactcccctaccctacctttacctctgagagggtacccacgcaggtatcccccaatcccgggacatcaattctttacagggttaggctcatcctctccaggtgaggccagacaaagaagccttgtgctacatgttccctggggcctcagatgaactcatgtgtatgctctttgataggttcattagtctctctcaggattccaggttagttgacatgattggtcttcctatggggttgccatccctttcagtttcttcagtgcctcccctaactcttccataggggtccagacttctgcctgtctaatgcttgtctgtgagaatcttcatctatctcagttagctgctagtaggacctctcagaggacatccacgttaggatcctgtcgataagcacatcataacatcagcaacagattcaggctttggtgtcccactccccaatgagatgaatcccatgttgggccagttactgggccatctttccttcagtctcatctccatttttatccctgcagttctcttagacaggaagaattctcagtcagaaatgttgactgtgggttggtaactccaaccttccaattgaagctctgtctatgtactggaggtggactctgtgagttccatctccctactgttgggcattttggctaagggcacccctattgagtcctaagagttaatcacctcccaggtctctagtattttctagagggtcctcccacctctcacccccagaggctgcttattgtcattcattcaactggtcctctggtcttctctcttctctcccctatacctgatcctgttcctcttttcaacttctctcccctctcacacctaggttcctccctccctctgactcccacaattattttgtttcccctggccttcctatttgttaaacttcttatggtctgtgagttgtatcctaggtattttgtcctttggggctaatatccacttatcagtgagtacataccatgaatgcgtttttgggcctagattacctcattcaggataatattttctagttccatccatttgcctgaaaattcatgatttcttcatttttaatagctgaataatattccattgtgtaaatgaatcacattaccacattttctgaatctactcttcagttgagggacatctgggttgtttccagtttctggctattgtaaataaggctactctaaacacaatggagcaagtgtccttgtgatattgtgtggcatcctttgagtatatgcctaggagtgatatacatgggtattcaggtaaaactatttaaattttctgagaaacaacaagattgatttccagagtagttgtaccaatttgcaaatctcaccagcaatgaaggagcattcctctttcaccacatcctcacgttttagatcttagctgttctggttagtataagatggaatctcaggttacatttgatttgcatttccctgataactaagggtgttgaacatttctttaaatgtttctgagtcattcgagatttctctgctgagaattctccatttagttctgtactccatttttaaattgggttatttggttttctggaagttagcattttgagttttttatatattttggatattagcactctctcacagatgtatggttagtgaacatttttcccaatctgtaggttgttgattattcctattgatggtgttctttgttttgcagaagattttcagtttcatgacatctgatatcaactcttttttttcttttattggatatttttttatttacatttcaaatattatctcctttcccagttcccctctgaaactctgtatatcatcccccttccctctgcttctaccagtgtgttcccccactcacccatccactcctgcctccccacctttcatacccctacaccagggcatagagccttcataggaccaagggtctctcctctcattgatgcccaacaaggccattctctgctacatatgtggctggagccatgggtttctccatgtgtactccttggttgctggtttagttcctgggatctctggggagggggagtctggttggttgatatttttcttcctatgggtttgcaaaccccttcagatccttcagtctttctctaatttcttcattggggaccctgtgctcagtccatggggtaggctgtgagcatccatctatgtatttgtcagactctggcagaacctctcaggagacagctatatcatgttcctgtcagcatacacttctgggcatccacagtagtgtctgagtttgatgactgcatatggtatggatccccagatgaggcagtacctggatggcctttcatttagtctctgctccacgctttgtctgtgtattttcttccatgagtattttgttcccccttctaagaaggaccaaaacacccacactttggttttcctccttcttgagcttcatgtggtcagtgaattgtatcttgggtattccaagcttttgggctaatatccacttgtcagtgagtgcataccatgtgtgttcttttgtgattgggttacctcacgcaggattatataattgatccatttgcctaagactttcatcttagagcttgaaccattgatgttctgttcaagaaaatttccctgataccaatgagttcgaggctctttccctctttgtcttctattagaatcagcgtatctggttttatgttgaggtccttgatccacttggaattgcactttgtgcaaaatgataaatatggatcaattttcagttttctacatgcagaccatcagttagaatagcacagtttattgaagaagctttcttttatctactttatgcttttgactttattgtcaaaggttaagtgtccatccgtgtctgcatttatttctggctctccaattctattcctttgatcaatttgtctgtctctgtaccagtaccgtgtggtcttcatcactattgctttgttgcacagcttgaggtcaggaatggtgattccctcagaagaccttttattgttgagaattgttcaggctatcctgggatatgaagttgaaaattgttttttccatgtctgtgaagaattgtgttggaattttgatggagattgcattgaatctgtagattgcttttggtattcttatcaatccatgagcatagggggtatttcagttttctgaggtattctcgaatttcttggaattcttgtcatatagatctttcacttgaatggttacaattacacaaaaatagtttatattatttgtggctattgtgaaggtagtatttacctgatttctttcacagcctgtttataatatatataaaggaaacctactgatttattttagttaattttttatcctggcactttgattaagttgttcatcagatgtagtggttttctgttagaattttgggggtcatttatgtatcttatctacaaacagttacaccttgacttcttcctttctaatacatatccccattgatctctttttgttctcttattgctctagctggaacttcaagtactatattgtataggaaggaagagagttggcagccttgtcttgtccctgattttaatgggattgctttgactttctctccatttcatttgatgttgtttgttggttttctgtatatggctttcacatgcttaggtatgtgccatgaattcctgatctgtccaaagctttttgcatgaacacatgttgggtttttcattatataatgagatgaacagatgactgttttccttgtgtttgtttacatagtgtattacatagtacagtagaactgcaatagtcctgtgaataactggggacagtagaaaacacaatcactccagtaaatcatttaacaagagggaggttttgaatatcattaaatataaaagttgattctctattctaaaattagtttgttttaaaatgagcatctttcagcctctctattcaatatacatctgtttcttatactacatgaaagtttacctcttggagctagttgattatggtctcttaattaaaactaatgagattataagatggttctgtgggtagaggcaactgcaaacaagtttgacaatcagtcccctccacccacatggtaggtggaggggagaaatctcacaagctgtctgctacacacatacatccttgcatgagaggagacatgcaaattttcatcagctctatagaaattgctgatggttggtaatgacttatgcaagttaatgaaaagaagttaaaaatcaagagacatgaaaagagagctcaagtattgtgtgactttgttttagagtataaatgtaacaagtctagatgtcctgtccatagaactacaaatttttatagtcaacatacacacacacacacacacacacacacacacacacacacacacacacagagagagagagagagagtatgtgcatgtgaatatatatatatatatgtatacatacatacatatatatgcatacaacaaatatgtatatacacttgtatacatacaaacacacacacacacacacattctaggttattagtgtatatacatgccagttacatggtaagagagatagggttcccaggagattgtgttgatgtgtcctatgatcgaaaaatttaacagtgaatgaaaaaaaacaccttatatggtagctgtttaattcttgagcagtatctatgtaagataatcatatgatccccaaactgaacaaattaaggcttattgaaagtgagtagagaatataatagatggtaacaacaagagctgcaagccggggtcatgctgtgatcctatctaggagaagaaaagaggtttctgaccttgccctacttgctctagaagtatttgtcttttagttcttgcaataccagggagctagggtgaaaccctacataggaaaatgggtgcacatgctaggaaacagggggccatacaagtttttaaggaggatggtgttgaaggctgggaggaatatattaagtacctgcaaagaacactgagtctgtgtaaaatatatatgtgaaaatgaggcaaaggtgtagcgcagttctgtatattcccatggtcttatgtctactgtgtagtgaaggttatgtagccttcttataaatttcatcctctggatcaagttctacccagacttactatattaagtcactttggatacatttcttggttccatggcaaaatatttgacaaaagcatttggaaggaattggggcttattttggctcacaggtcaagggcacagtcagtccatcatggtatggaatgattaactttgggtgcataaggcagtgtatctcattgagtgtcagttaggaagcagagggaaatgctggtgcttggctttctcatttttcctttttattcagcctgagtccccagcccatgaatggggttgtccacattcagcatatgtctcctcccctcaaaactctctggaaacatcttcacagacaccgctgtagatgtgtcttttagatgattccaaacttagcaagttggaaatcaagatgaactttgaaggaagccatgtcccttttgctatcagcaggaggcagtgattgcgcatgctcattgcaacacagttatgtgcggtactaatgcacttagctctttatgtatctcttctaggtgctgatgcagtctccctaggaggtcatagtcactctctagtcactgtaaagcattgccctgtgctttcaggatccttttagatatttctgtaaagcagctcttagctttttattttcttttatgcttcggtgcaattttctgtctctgggactcagctatgtgtcccacaggaaaaaggctggcagatgtgttaagtgcttggctgttagccacatcccaccttttttttcattcagaaatgactcctggtttgagattcacttgtctactctagctttctttttttctcataggtcatttctctttagggacttcttgtgactgtaattgcaggcttccctggtgaatgtcagtttcacttgtgaatcaaagccacagaagttaaagctgtggagaagacttagtctgaaaagtgcccaccacacatacatgaggacatgagtttggacccctagcatctatgtaacagtcatgttacagttcaggtttgataagtcagtgtctcagaaactaaggtggaagtggaagtgagaaaacccaagagatcaaactctggcctctgtgtgcatatatgtaaaataatgttagatataaacatgacacacacatacttaatgcaaacaccagcaagtacacacatatatgctagcacatataagtatatatgatatcaaagatagcagtaccatgattagtaacacaatgaatggtgaattattatattgacccagttcaattttgttggtgttgaattaagtagtggtggcataaaaaggaaggaaacccatgctgattataggaatgaagcaggatgctacttctatgacatggagtaaagaaagccatctatgcagatctataccaaaagaaatgtgtaaaactgtgagaaatacaaatcctggacagcaaagactctctcatgcctctgctggaagtgcagcttgaaacaatgaatttctagtcatgattaaatctgacagaagtcatggaggaagtcacaacattgagcagagatggaagactggtaaaaacgtgtgcataaggaggattttagtgatttcttaaaagccaaaaaacaaaggaaagaatttggatagtgagcaatttcttctaaaatatatcgattttttttagtaaaagtgctttattgggaatcaaagagtaggttttggtaatttcattctgcccaagaataaaactcttgtttgttctcaggctcattttttgaggcaatagatcaatcttaaacatgtaatatgtgaaataattaatgctgtaggtatacacagaagaatattatgaagtttcccttttatttaattactgtgtttaaaataataactataatgcttactattacaaaaaaagctagtgaaaaattcagagatgttatgtccacatctactaaaacatatatttgacatttgagttgggcttcttacagccatttagaaatacagaaggggcatggagatgtgtctaggacagctggatgctttactagtatacatgaagcctgggttccacatatagcataatgtaaacttcgtatggtggtacattcctctagtcatatgctggggaagtaaaagtagaaagattaggagttcagagttatccttagctgtacagccttgtgtgtgtgtgtgtatcatctttcttacagtgttactcagtgaaggaaggggtgcatgagcaagggagtgtttgtgtgtgtgtgtgtgtgtgtgtgtgtgtgtgtgtgtgtgtgtgtgtgagagagagaaagagagagagagagagagagagagagagagagagagagagagattcaatcttgtgaggctatgccagtgcctggcaaatacagaagtggatgctcacagtcagctattggatggatcacagggcccccaatggaggagctaggaaagtacccaaggagctgggggcatctgcaaccctataggtggaacaacaatatgaactaaccagtaccccctggagctcgtgtctctagctgcatatgtctcagaagatgaccttgtcggccatcagtggaaagagaggcccattggttgtgcaaactttatatgcctcagtagaggggaatgccagggccaagaagtgggagtgggtgggtgggagtatgggggggggtagggtgtggaggacttttgggatagcactggaaatgtaaatgaaataaatacctaataaaaaattttaaaaaactaactaaatggtatatttaaaacagttgtttattactataactaacctgctttaattaactttaggcaatagttgagtttccagttaaactctttagagatgttgatcctttaagctgatcaaacactagagtgacagtaggcatgggctgtgtatgactgtgtactcactgtttgaataatccctaaagacagtgggtaggtttacttcttttcttctttattctattcaccatgtgctttctacttaggactgtttcacagaagcaggttttcttgcttgcttcaggagcagaaactgactttatgggtctcccatctaatcacagtgatctcactgaatctgtaaagctctgcttagaagtttgtctgaggtttccaaacatctctccttgaacaagtcctttatctaaagtggcatcatgagtagggtaaagcacttgccatgcaaaagtatggacctgagttcagatcccaggactggatgttaagctagacatggtagtgaggcactttgcatatctaccctctgacgtcaataaagggcagctgtggcaatgacattcctacacttgaacacacatcatacatgcacagctatacacacatatttaagaaaacaaaatggaattgtattttcatatcttcatataactaataattaatataagtcatttctagattaaaatacaagatattgggtaaatgtctgtaagttgttacaatcatgacagtttagagaatctttagaaaaattatacatatacaagaacaaacatttttctgaatatttatcctccaatagaggttgactatgtacatagacgaggaactcagagaaactgactgctgaacacttttttgtaatgcagttatttacagagagcctgagcatgctggcttccttatctctgatcaataagaatcttaataacacctggtgagatagattttataatttcaatatgctatgaaatagatcttaacttggtggtagatatcaagattaaaaggatttttttgctaaaagaagtaacaaggatcatatcaagccacatacaaacatgaataaacagaaaagatgaaaagaatggaacagaaatacatggagatagtctttatttcctgtgatgaagcagccttctcagtttatagttccatcactgagggatgtcaagacaagagcttgtatcaacacattatatccacatagaaaggaaatggatgcatactgtactcagctctgtttttctttcatattgtctaacactcaaagtcagggaaaggcactgcccacttttaagctgggtcataaacaaatctctgccaggcactgacacaggtcagactgaccaagagaatctttctctgcccaggtgactctagattgtgtcaaggtgatgctccttgtaggaaatcatgactgaaagaaagcacaaatgggtcagttgtgaggccatgtggtatgtcaatggtcttggctcacagatcttggcattattggttttggttcttggagaagtttacagaaagaaaatactgtttaatgtgtcctcctcatttacaacttacattctaactttgtaaatttggtagtatgtattgacaaccttaatatttacttgaaaacccttaatctgtattgagatcacatattttcttagacaagtccattctcataactcatagaattagctagtggataatagtgacggaagtggcttttatgacaaattgtgatctgaattttaaacaagggtcaaaatcataaaaatctatggtaaaattgagtacaatggacattgtcccagaaggtgggatttcaggtctccaagattaacaaaagattgaaagccaatagggaattgagtaacttctgaacacttatgtcaggtcttctttccagtggttttggaaatactagtctgtgtagttgttgtggggaagaccactgggaataatagaagctgaagactggagagatagctctgtatttaaaaacacccgctgctcttttcggggaccagagttcaattcccaatacccacgtcagatcactcacaactacccgtaattacaagtccagaaaatcccctgctcttttatgtattccaaggatacctgctcatgcttgtacatattcacagagacacttatatagacaaactatttaattctaaaattaaaatctaaaaaataaatcatagaaatgaggctggggacctacctcagtggtagagtgcatgtggagcatgtgtaagatcctgagttcaattcccagcacgatgatggtgatgataacgatgatgagaacaaggacaaagatgacaacaaagacaatgacagtagtaaacaggaggagtcatcaaagttctacacatacttaccattgtaaacaacttatttccactctttggttttaaatctccattgtaatttacaattgtttgaaacacttcttccctctctcgtttccaacaacctaagaaaccctccaagtattccctaaggaaatgtaaagaggagatgtgactgacctgaattattaatgagagttttaaatggtgctgagactggagagtaaggctgtcatcatgagctgacatagtacacttcccctaacaccctcattcatactggagatatgtctctcctgccaccctggtagctgtctgcaggttctctgttgatctctgaattcagccacaggggaagaatgcttatcataatcctcttattccagaactccttcttgaaccccaaatcccccaaatcttagctctaagtctcttcaacctatatcaatgggggctaattgaagtgtaaattgtatggttgagaaaatgaaacacaagtaagaagaagaagaggactatgtactagagacagcattagagagtgaaaaggaagtgtgttgagatctctatgcttagcccaggtttttcccagggtcactaattagcaaatccagactggatgaagaaacctctaacaaactataagagattaggaaaatggtgggagtggttcccaccttcaggttggtgctaagacaatggtcaatgatgactgaaaatattacaagctattctcctctctctctttaattaaaatgtgtgtgtgtgtgtgtgtgtgtgtgtgtgtgtgtgtgtgtgtgtgcatatgctagtgaaagctgaagatgttgttagatcctctggtgctgtaattcctggcaatactgagccagcacacatagcctttaggaactgagttccagccttttgtaagaagagcaagtactgttagctgtcaagtcatctcctgtcagtcccattccaagctacttcaagttctcaggtttatacatgttgctatctctgcctaagtatatcaggtgttaggcactgggcagtcttatcttctgactaatactgaggaaactaatattgaaaattgttagaacataggccctttgtctataaatacaaccctctcctgccctgactacacagcattcattaaatgacatgcactaataatgtgtgaagagggcttaaatagatccccacaaacagagtgcattatgtcataaattagagggttaatgctatctaataaggcagctatctttctattttattcagaaatgctttctttttttctaataatatacatagaccaacatttaatagtcactatgatctaagctttaccagaaatcccaatttaatgtccaatgagctgttgattaagttatatgacatttggccatgacaggtgagagtatgtctaaggaatgactattacttaaatggtttggataattgcaccttttttaacctgatttccataggctgttgacctatagccttgtggatttgattacagcagacatcactgcttatatcttagttgagtttcagctgagttgtttcagtgtcctaatggatcagtgtgccattgtgattcttaacttattctcttcttagagagatcagttctggtttgtagggtgtggccttcttcctatttgattctctatgatgaactttctgaaggataaatctgatggagtccatccatgttctggccttaaacaaggaacagttttacttgaactttggattttcctatacaaattatcatattctgctttacctatagaaatacattttgtataaaacttaaggttgagtgatttctctaatgctgtacatttttaatgctgtgctttttttcctcgttacatttacaaacctaggcctatgtctacacacacacacacacacacacacacacacacacacacacacacacacatatgccagagtttggtattaaacgtgtgtgtgtgtgtgtgtgtgtgtgtgtgtgtgtgtgaaagagacagagagagagaaaaagagagagagagcgagcacatttaaggcgtttattaaagccaaagctgttaaccaaaatgttttaattcttgtatttaggtctaattttctccaggtttaaaaaaatacacaaaagttctatgtctcagtatatatgctatttttattcaggtaagggtgaaagcttaaagagaaagtgtgttttaaacagcagttgggttttgggaaaattacagactgaaatacagcagtccttttatatgttatgcctaaagtgcagggaccccaaagaccacagaggagccaattttgatgcaaatacttaagggtattattacaaactcacaagcaagaactttcaccatcaacctcacagcaagtcagaagtgagaacgtcgagtctagtagtgcagggtatttattgtggttacagcagttggggaatttccatacaggtcagaaagttagtattttaaaaactgcatttctggtgtataatctgtaggaaccaaacacagatgcaaagccatctgacaacgaggattgttgagttatcattttctgcaggatgttttaggttctctatatgtatcatgagtctgctgttgtagcctactggatgttgctaaagggggtttccataggatgttatctcaagtggagtttgtagtttttcttctggaattgcagtttagctcctttgcacaaaatggagcttcttctccaaaacagagttggttgggctttacatatgcaagttcactgctttgatagcatagtctaggccttatattagtttataattaccaatcgacttaagtaagtaatgcccatgggattgaacttatttagaaaaaaaaaaaaaacgagaaggtagctgagtggatagagcacttcctgcacaggcatgagatccatgttcagatccacatgatacatgggacgtagcatttggtaacactcatctggcagatgggagagagaaacagggagacaagataattctagaaaacttatctggacagttcatttggagcgttcagtactgcacaagagacacactctcaagaaaggtaaacggtagaacaaacacctgagcttgtcctttgacctccatgtagcttgctcacatgccatgagtgtacccatgcgcacacacacacacacacagtgagagagagagagagagagagagagggagagagagggagagagagagagagagagagagaggataactgaagaacgacaactgtgatagagacatttctgagggaagggcacaataccctggacaaggaatgcacctagaattccaattgagaacagaacatctggagctgattccccccgcccccctttactctcttctgactattcctccctatgtttggtattaaacagctatcattacattcagaaaaagttttctatttacatatgaaatatcagttatttctgtaagaaacatcgataaagctaatatgttctcaaggtcatctactaggaattgatttaggattagaaattcaaacatcaagcaggtcatcagcaaagacactgccagtagccagtgttcactgaaaagccactgctgcctgctgttcatttcccctcttagtttcatagcaacacacagaaatgggtagcattcccaactcacagtggacgccactcttcatagtgcttatgcaattgatcacaatgataccaactcaagaataaacagaagtgttaaatattatagattataactgtcaaaatgcaacatgaaagactaggtctcagatctgcagacatggctcagcagttgatagtagtactctgccaggctggtctcagactcactgccatctacctacctctgcctcccgagtgctgggatgaagtatattcaccaacacatctggctttgaggcatttctcagattcagtatgacttgtatgtgaactaggaatctgaatgtgatcagtcccattttattgcttttcattagatttactttttctttcaccatgcaaagttttctttctttagaaatgtgcctattggatggatggttctttttctttggtgggtcagatgtcccactcaacaaagacttgctatgtgttaaattactgtgctttgaaatgaccctgtgaatgcaaagtacctaccacaccttaatcataatatgttgctacttttcaaaaaacctcaatgatgaaagctttgcctatatgggtttgtttgtagatctttcacagtttgaactggctttcaattgctctctcactactttgtacaggtatatgctttctcttgcctgtcatgtatagcataaagcccaggagcaaaccatctctatggattgaatttatttctcttcaatgcatagccagtggcgaggttgttgctacactatatggtagacatattctgaggatttaaaaaacaaataattttgtttcatttatatgctaactgataacgaaacatgttctaaaactccttgtcacacatgcttcattttgatgggctaccagccctggtaccccttaaccttttcgaccctgctatttgtgccaagtattttttttcctttgctattgaatgtgttctactgccttccccagttcctctttaaagtcttgtagagcctcccttttcaactctcatgattctatttacagtgttctggactttgttacattgactcccacctggatgcacatattcagttaggagctaggatctgcataaaagacagaaggaatagtagtttttagtctgagtgtgggttacatttcctaatataatattttgtagttccatccattttttttataacttaagttttcttcatgacttaataaagttctattgtgtaaatgtactgtatttctattatccattcatctgttgatgggaatatagaggtataatttgaaaaaataagaacacttttcatgactattcttaagaattctaatgtacattatattattcttaataaatgtcttatttagaatgtcttatttagaagtgtttttttttctttttgaaaagcaaaactaaatcattgtgggaaggatgctgttaaagtcagagcctctcctggagttcattaaattaggaaattaaaagtagaagaaactgacaagggaattagggcctgctgtggaattattctcatagctaaccagggaagcaaaatggtgtcaaagtcataattattatttgcccttgaagtagccttgctaatggaagtagaacagaggaaaatgttgcatagaaatcctacctgaaaactattttcaaagctaatatatccaagctaccttaccacaatgtaataaaaaggaagggctgtaggctctggtttgaaaaaaaggtttcaatttatagtataagtgcttatttgtgtgtggataagtacgtatgtgtcaagattcttatggtgaccagaaaagggtattggattctttggagctggatgtacaggtgcttgtgtgccacatggtatggctgttgctacacaataagaaagcaggctgagaaagccatgagaaacaagccagaaagtaagattcttccatggcttctgcttcagtttcttctcctaagttcctgcctggattcttgtcatgactttcccccacctcagtatgacccaagaatagtaagatgaaataaaccatttcttctgcaagttgcttctttttgtgctgttttatcacagcaatagaagtcctagctaagatatcacaacccaatatgggtgactatttgtcaaatcgacaagcctacacagcttgcaggggctccacagtttgagactccctattgtccaaggcattgtcacctagcagttgttcactacacctatcaagataaagatggggactcctgaatactgcaaggtttttcttgccacatggaatattctgtttgccttctgtgttgtgccagtctccttttacttcacagaggcaatgtttaaattaaaggaaaatactatagagcacagaggtgtattggtgacctaaaagaaaaagacatgtatctcacatgcttctggtgtcaatgttaggttttgggaccaggagctattgggttgcatataaatcaattttattacaaacaattgggaaaggaaatggctaactcaatattgtccttgtcttgtaagcatgaggtcctgagttttttcttcagaaccaatgggaagaacaggaaatgatatatttttaaaattccagaaacagttatgatcagaggcagagaaaaataggcggacccctaggtataactgagcagctaacctagtctacttgatgaagtcccaagccactgagaaattctgtctcaaattaaagctggaaggcacctgacaaaagacaaccaaggttattttctcacatcacattcatgtgtgactcatactgaaagagagagagagggatggagggagggagagagagagagagagagagagagagagagagagagagagagagagagagagattctacatctctcaactacaaggagggcaagttttaaccaaggcataaaaagaagggaatggctatttaactaagaagttatgtgaagctttttgctattgatgaaggatctttaaaggtataatattgatgctcatttttagatctcagtctttatattattatttcccactgacattagatcagaggatgcaaaatcatcctcacaacaattgtctagaaaaccactaactatcaatcatttagtttgggtattccattgtattcattattttttgttttctgccttttctttttgaaaatttgtatgatgtgtggcatgtgtatatgcatgtgagtgcagtgtccattgaattcagccggggatgttgtatcaccttgagctggagttgaggtagttgtgagctgcccagtgtgagtgctaagaactaaactcaggtcctatgcaagagtaccaagtactgttaactgctcggttatcttgcaagccatggtgtttgttcctcatattattaaagacagtatatttcatcaagattctataaattatgtatttttattctactttggagtaataacaattcactacaaaatatcagaagtgatgtgggtgtgtccatcacattcaaactcagttctctacacaccagaatggcttgtgatgttcccttggtccgataaactctgcagtgggtagtggttaatgtaggtttttgtctcaagtgctgattataagagtcagtgatctgagctctagatgagactatgccatagtactcagagaatagtctacaggagaagacataaaataaaatattctaaaagcctgagaatgaggatgagtcctgtggcatgattatcttctggaaatgataggattattgtgctcatgaactctcagtagctaagttacttacacaacatgacacctgttaaaaattgcatgcccctcaacagaggaatggatacaaaaaaatgtggtacatttacaaaatggagtactactcagctattaaaaggaatgaatttataaaattcctaggcaaatggttggacctggagggcatcatcctgagtgaagtaacacaatcacaaaagaactcaaatgatatgtactcactgataagtggatattagcccagaaacttagtatactagagatataagatacaatttgcaaaacacatgaaattgaagaagaacgaagaccaaagtatgaacactttgccccttcttagaattgggaacaatcacccatggaaggagttacagagtttggagctgagacaaaaggatggaccatctagagactgccatatccagggatccatcccataatcagcctctaaactctgacaccattgtatacactagcgagagttggctgaaaggaccctgatatagctgtctcttgtaagactatgccggggcctagcaaacacataagtggatgctcacagtcagctattggatggatcacagggcccccaatggaggagctagagaaagtatccaaggagctaaagagatctgcatccctgtaggtgcaacaacattatgaactaaccagtaccccagagctcttgactctagctgcatatgtatcaaaagatgacctagttcgaaagagaggctcattggacatgcaaactttatatgccccagtacaggggaacgccagggccaaaaagtgggaatgggtgggtaggggagtgggggggggtatgggggactttttggtatagcattggaaatgtaattgaggaaaatacgtaataaaaaaatcaaaaaaaaattttatcaagtatccccattcgttttcaggacctgttgtaaatggggaagagagagtaagttttccttaggagtaaggccactgctatacccacatggatggcactacatcttgtacacataggcagcagtaattggactcagtgagttaaatttattaacttattttaagggcatgatgtttggaatgagataagatgttggtggtagagagttggagaaagggcgtagagcagaggtatgagcaggatacattatatacatgaatgaaatgtcagagaacaatgaaaacattcaaaatgtttgagttctatcacactattgcagcagcttgaatagggtttgcattaagtataggtacaataccaaaacctaatatgattaggaaatggaacacaaattgattggtttgctttggacgattttaaaataattattaattatgtctttttttgacaaactatcacagatatttctaagatacttggtactttactatgtgataaggtttgaaatcagggaagtttgacaaaactttgaagagccttcttgatcttttcaaactgtgaaaactataccccttctgaggagtagactttaatgtcacacaaggggtgctgccagatattgccttctagagtctctactctgctggatgttgcacttcctttctttatagttgaatgttctctcatcatgcctttttttttcttcccgatttctgaactgtgatggcaagctttgaactcaaaaagaataactcatagagatcccagatagcatgaaatagtcacggtgacttttgaaaaatatttatttggctgcagtagcacttcaatttttaccagaacatgacaatttaactttgaaaacaagctttaattaaatcaaaggtggaaaaggttggagtaggaaaatcgaacagattactttgaataatgattaaaatgcttcaatagaacaagtcattgttcttagtttaacatattctaagaaagactacaaagtgagaagcagatatgattttgtttttaaaaaatattttttatttagccacgtaccatatgtgtgtctgcgggcactcaagccacagtacacgtgaggaagccagggagcatcctatgggagtcagttcgctctctctctaccatgtggaccttggagactgaactctgggcaacaagattggtgccaagtatctttagctactaatctatctcatcaggctagacacagaaattttcatggtggtagaagaaactggcaatattttagattaatctaacaagttctattgtcttgataatctcacttaataagtcatgtctacttacaaaatattaacttgatcatgatttgtgttaaggacaacatctctaaatgaatgaaacacatgtgaacacatttaaataaccctctttgacttttaatgaagatgtcattaaagcaagtgtatatagccaatcaacaatcattattttctagaagtaagctgctaacagtgaaatatgttttgcagatgtataataaaactgagcaaacaagaagctcagataaatcaatgtttctggggcacaattggcattgttaaaattattctctctgtcctcttgatctccactccagcttttgctggaaccctccaagcacagtactgaaagcttcttattggaggttgacaggcaacagttgcttcgatcaaagtgttctgaaggtcaaagtgatggagatggccaaactggcctatgctcttcatttccaaaatgtgcactcctgtctccacatttgtataacttgtagacatgaacaaatgaataaaaatccctcctttggatctggactatgaaatttctttaaaggctacaaatgtcaggctgaggagagagctttgtggacaaaatgcttgccacgcatgaaagagggtggatatttggatcctcaggatccctgtaaaagctgcaatcatgacagcttaaatggaatctcaatgcccaagatgtggaggaggaacacctaaagaccaaattggcaagctgaaaaactccaggtaactcacaagatctgcttcagcaaataatgtggagagaaattaaggaagatcaactttaggcacacagacatgaacacaaatagtcatatgtatgcacaccacatgcacatatacataacaatttaaatgttctatttatattacattggaacttatttatacattgttactaaaaaacttgattaatgttatttaattttacatatttgggaaaagtctcattcaaagactccagtcaagaatctctagaaaagttgtcagtaatgtaaccacaagaaaatgatggcaagtcaccttcccataaaacatctacaggttcaacagtctccatttcccttttgtttggtgttggttgtcagtatagagtttgagtcttgtcgccaacatctggatatagttacactgctagctttttaaaaattacttttaaatgtacttattttatatgtggaatgttttgccttcgtgtatgtctgtgtaaatgctctacctggtaccggcagagatcagaaggtgcaaggccagagtcttgaaagtggtggtggtgtggttgcaagccagtatataggtgctaggaaccaaccccttggtcctctgcaggagaaacaagtgaacttaactcctgagccaggcctctagcttcatatttccagctattttctgcattctccattaaatgaaattgtcagatgtatagaaaagacagaggctgtaatgttggacttttctttttatttcacttagaagcagactccaaagcacttcagagttaaatttctctaagcttagaggtgttgtaaatgataatagaaaatggaggtacctgttggattggcaccaggggataggggtgtggagttggggcttgctggtctctagctgtttttcctcattattgttcggtaaatatgaacaagcacatcactcattaaaacaagctttttgatctgtataggatgtcattttgaaaataggtgtctgaaagagacagacagacagacaaacagacagaaaaacagtctgtataaatttgggcttgaagttttagagatggtcacattttgttttcaaccaggagttgtttggatgcctaaatgtgcagtccctttctgttataaaagacagcaatttttccaccactttattctttgatgtatttactctgcctatgcactcagggtgtactcttagcagtatctcaaatgaccaaaattatacacagcgagaattttttttggctgattttttcttctttttttcagttacttcagaccacttctcttaaagaacactcatcacgagctagcatttataactgcctcctgattttaaaaaaaaatgtgatgtttcagataatattcctgtatgtaaggggacacagtgcagaaactaccaaatggctgcaccattagggggatggtttttattgtgggtaagaaagaatgagaaaaacaatccaggctcagatgaaagagtcatgcacagagaaaggggaagtaaactatatatggccagggatttcttttttaattttacagagagagagagagagagagagagagagagagagagagagagagagagagagagagagagaatggcatagagaaatcataaggattataaggaagagttgttgcttgtgggggagatgtctgtggacagaaaatctttcacaagttctctacgaactctgtcttttatttaatcaccagaaaactttctgtagcccagtatgagctcatttctaggtataggtgctccctgagacttaacagcccctcacaatttgtgatgatgattttaaacaccctgaagattgatgctttatatattttaatagaaaagtttattttgaagattgcatttagaacaggaggcctctgcaatgctctttaaatggttttgagagaaacaccggtgtctattttaaaataggagtacatgttcaagactttagaaatcatagagttaaaacactcttaatgggattgggaaattatttggtaagtaagagtgcttgctgtggaagcataaggacttggatttaaagatccagtaaaaataaaaagccaggtaaagcctaattcttctataacctctttgctgtagagggcagaggccgagagaaatctaaaacttactatcagcctagttccagttctggtctcaagcaaatatggtggaaaatagtgaggaagaacactcagttacatacacacacacacacacacacacacacacacacacacacacacacacaaacacacacacacacacacacaaacacaaacacacacacacacacacacacacacacacacatacacacacagaggcatgcatgtgcacacttagacacacagacccacatgcacatacacatgtatatacacacaaatatatacacatacacacatacataaagatacacacacgcacacacatacacacacttacacacacacaccttttagttcttccatattcaatgtggcattttgaacatttactacactgagatgctgagatgcctagggatattgcaatatgctcagagaatggaatgatcaaggaacccacctcattccacagtacattccaacaatctgaaaaatccaacaactttggaaaatccctgattaaaagttaattgttaaatgatctctgtgtgtgaattcaatttctattccattaatgacacaactctccttgaaaacagaatgtatttcatttttctagcttttcacaattatctctctgtgtactgtgtgcaggtgcatataagtctatatatgtggagtccaggagacaactttgggtattattccccaggagacatccaactttttgtattaatcaaagtttctcattggtctgcaacactcaggtaggctaggcttgtcagcagtgaacactggagaagcacttactgctacctgctgaatgctgggattaccgcacctagctgcttccatttctgcttcttgcttgctgcttcttcctcttcgtcttcctcctctttctcgtcctcttctttctctttttctttctcttctttctccttttcttctttgtcctcctctctccttcctcctcttcctctttttccacttattcacatcgcttctgttgacctaattcaagtcctcatgcttgctgagcaagccctttaataacgggactatttcccacatccctgttttcattttaaaagtaaatatggaaactcatagttaaggaccctttcatttcacctaaaaataaactccaaaacttgagactaagccaactctgatatttcagatattgtattgttgccacgcccatctcccatgttaagtgttaagtgaacttggagctctcttttgctgtttaaattgtggtctgactaatgtgctccctcctccttatttccatttttgtgtaatgatagagttcttcaaaggcccaatgggcagcatggtacagcatacacactgcccaaggagctaataaaaaatttacgcactggagcctcagttacatgaattattcattgacaactatccatcagggaattagaagtttatggcaacaggagctgtggaaaatagaaagagaaatcacccagtgccaactttttaaacggagcattggaaactcagaatttggaattaacccattcgtgttggaagtcattgtgtgaaaccctgggagagattacaaggattttaactagttatcagataagcacataagtggctactaagtggcaggcatgacactcttctttattgcctttctagtcattaagcataccagcattcacagcacaagcaacattttcttgctgacctcagcatccctctgtaacatcgtttaggtatagcacctcagtcagggttctggtcccctagaatagaattctgttctgttttcttctttattagaaacagcccatcacatcctgacaaggtgttccaacagagaggaaagttcaaccattcaaccggcttagtaaatgcaacatatagaaattgtttcctggttttctcaaatgacttttaactgtcacccatgattgaaagcacttcacacaggacccaccatgcagagtacttcacgaatcagatgttcagaacagtaggttgacctgttctgaaagagtgttacttgttatttttcataaatattctgtgagaaaaaaatatcaccaactgattgagttcactgcttaaatagaatccacccccacctctctctccattttcacaaagatgtacctgcttaaatatatttttgaataaacaatatgataaagattgataaaatgagtccctgtacaagtacaaggatctggctttaaacaaaaaatccatgtgaaaatccagttatgttagcatgagtcttaaatctccagagcagaaaaggcagagtgcaaaggacctctggggatggcttaaccagtttaagcaagtcaatgagaaatcctgacttaaaatgtaaagggaaagtctggggttgttgctcagttggttaaatgcttgcccatcatgtttaaagctctgaagtaatctcctgcacccataagcagggcaatgtcatgcatacctgtaatcttaggagctcagacatggaaagatcagaagtttaaaattatccctggctttttagggatttcaatacaagcccgggctacacaccttttcaaaataaagcaaacacagaaagataaaagaaaaactaacttgcaaagagaatgaagaggatgcctggggactggagacatgactcggaagttaagaatacacactacccttgcagaggagagcattcagctcctaacacccataaggagatccagagctgtccttaattcagacactccatgaatatggtgcacgcatataaattcaggcaaaaacactcacatacaaaaatacaaattaagaaatcttttaaagacatctggcatcatcttctgacctccacacacaagtgtggatgtccacgaacacttgtacacaaagagacacaccctagctactcacacacagagtagtgctatgtgctcttcactcacatgtagggtacacggtttcttttatactcaaatatttctcacataaaaatataatgacatgtattgataggtagttgctacttagaatatataatcatatataatttgaagaatctaacaataaacataatgttagaattatttcatgggcaaaaaataaaaatagcatgcaaagattttaggttttctcattctgaaactttaaataattatatgtataatgttcccagaaaaacttatctcttttcttttgaggctatcatataaaaaatatgtagcacatgtgtgtgtaaatttaaacgtgttgccaggaccacctctcttttcctattatgatctagtacatattctcttggggcagaaacacctttcagagattttattttactctcccacccctcatgtgtgtgtgtgtgtgtgtgtgtgtgtgtgtgtgtgtgtgtgtgtgcacatatatgtgtgtacatctgtgagtatgtgtgagtgtgggttagggtttatatgtgtatgcatatagtatgtatgagtatttgtgcctcagcctggacgtcagagaacagctttcagaagatgggtctgttctctttccacctcatgggttcctggtatgaaacacaggtagccaggttagcatggaatgtgcctgacccacagaaccgtctccttgcttctttccacaacttataagtggctgtttagaaatgagagttatagttgtattttcccttaccttttagtataacgactgatcagaagaaaatactcaaatagcatgtaactatttggagtggaggagataaagatttagcagcctgtcttaaccatgatttcacttactacatcagtgatcaaatataatccaaaaatattaaatgaaaaattatagaaaccaaccatttccatttctaaaattgcataccattccagtagcataaggatagcccataatacaactgtcctagccatgatacaaaatacacttgttcattgtatccatacactatgataactgactaaagtcatttagttctttttttggtcatcagaccaattaccatggtattatgtattacagtgcctatgttaaagtactacatgagttctttctttctttctttctttctttctttctttctttctttctttctttctttctttctttctttcttcctttattgaatattttacttacttacaattcaaatctcatctcatttcctgatttcaccccaagaaaccctgtatcgcatcccccctcctcctgtttctatgagggtgtgcacccacccacccaccctctcactgaagcctccccaccctcacattcccctacactggaacctcgagccttcacaggaccaagcacctcttctcccattgatgcctgacaaggccatcctctgctacatatgtgactagagcagtgggtccctccttgtttggttggagatttagaccctgggagctctggctggttgatattgttgtcctgtctatgggtttggaaaccccttcaactcctacagtcctttatctaacttctccattggaaaccccatgctcagtccaatggtgggctgctagcgtccgcctctgtatatgtcaggctctggcaaagcctctcaggagacagctatatcaggatcagcatgcacttcttggcatccactatagtgtctgcatggtctcattgcctaaggacagtgatgctgttattttgcacacagaaagaaatcacaaaatgtcttttaaattaaaattgaacattattgctttaataaacaaagggaaaacagaaaccaaatttagatattaaaaacacataatgttttgagagtccacatttacataacttgcattgtagtcaatttttatgattagggtatcttttgttgtttgtgtgctcttgtgtgtgtgctcttgtgtgtgtgtgtgtgtgtgtgtgtgtgtgtgtgtgtgtgtgtgtgtgtgtgcgtgtgtgttttagacagagtgcctatgggaagtcttggctgtcctggtacttcctatgtagactggactgacaaacttgcagagatcctcctgtctctgcctcctgagtaataaaattaaaggcatatatcactacacctgtcttaatattatattttattactagtgatgcttgctactctcttactgtgtgtaatttataaattaagccttgtctcatacacacacacacacacacacacacacacacatataagaaagtatggaatttacatgactgggtatgactctactttcaagtatccactggggcttctgaaatgtattctttgtggataagagttctcttgtgcatatgaactgaataatctaaaaatttgacaaccagctctaatcataatttaaaataatgcaatatctatattagtaaaaatatgttcaacttgtgaaaatatagacaagaaaaagatttcctagcatcagccaaagataaatgcaatcaatatttaatattgtgcaaaaacaatttaatatacttgttctataattgtatttattttacatgtttttctattttatttttaatttcattttagataaatgtatttatttatttataatttttgacaatagcagatctgtacttctgccttcaaaatctttaatatcactccttctgtataagcctcccaaattcatgacttatttctctttttagtaataacctattacattttccattgtacatattcattacatatgagatttagttacattctgatattccaaacactcatatattgtacatggaccacagagcagataaccaatatttaagaaatgaaaagttgtctaaagttactaacggatcctcttccaagagaataaactatattaaactatcttctcacttttcattttttaaagagtgctcttacgattctgtgaacagatccatcccactactaagtgcaggttactgcttttgcactaaatccattcatgctctggagaggacgacattaagtaatgtggtcaagtgtccaaggggacactatcatggaaactggggcattaatgagaaaggagacattacttcaaaataaattaataatgccatttatttcttgttgctcagagggacagcccccattaagatggattacattgaggcttctgtaagatagccaaggagataaaatcccctttattggtgtcactgtaaactgaaactggggagatttggcaagaccatatttttactccagagatgcacttatcccctgcccccatctttattaggcaggtgttaacagcctttctcttcagtgtggctctgctcccaggaccgcatggaaccatgggatggtttataatgctcgctgctgaggaagtctgatactgacccttgctagaaaatatcccctcataaaccacatgacaaaaccctttcatcatttaaaaatttaagatctttctcattaaagaaattaaaaatttaatttctttctcattttcccccaaagtagcataaattaaactccttgagccagatctgtgggaacaagaaactattatattttaaatatgcatagtttcagacacatatatatctatattatatatgtatttatatgtgtgtatataatgtagatgtttaaaaatcaagaaagaaatttcttacatgtatattaatttagcaattaacctctgatagtggggtgtgtgccatggtgtgcatttaggaggaagagaaactataagagggagtatcttagtctactatgtgggcgggggaatatactcagtctgtaaggcttgtaacactgaaccactaaagcattccactaatgaagatgcaaattctttaatttgttaaaaaaaaaaagttaggtggaggaaggactggaggactcagagaggtcaaggacaccataagagaatctgaagaatcaacttatctgggccttatctgagtctctggctcacagagactgaaccactatcagacagcacccataggatgcaactaggccctctacacatgtgtaacagatgtgtagcttgatcttcatatgggacctttaacaccaggagcaggggctgtctctgactttgccgtctgcctttggatccatttctcataacggccaccttgtgaagctcaatagaagttgatcctagtcctactgcaacttgatatgccaagtcagttgatatccatgggaggcctcttctttaaggagaaaggaagaggggagtggagggtgcggggaatgtgagagggacaaaataggagactaggaagtggaagctgcaattgggatgtaaagtaaatatattacttaaaagtgtaaaaaatcgactttttaatgagcatacttgtgtagagacgagcatgtgcttggggacatgtgttccttggaggctagaagaaagaaccagatctcctggtgctgatgctgcagctgtttgtgtggggtctgagaagcaaactaatgtcttctagagaagagtttgaaattgttaggcaaagccatagacttaggactggaaatccttatggttttctccttacctcctacctcaaagctgaaataaccgcccagtataaaatgcaaacagaatgctgctgtaactgatccccagtatcacagaggccagggggcctgtgacctagagagggttcctttgcctggttaccttgttgaacttcctgccctcaagttctgttgtgaaaacaacacttttagagctcaatctatggctgaaagaaaggagtgaaaatagagtgagggttttttttttcgttctattttggtataattgacacaattttccttatactccacccaggatattatgttatagagaaaaatgctttattgtttatgagccatttgggctctttaagcaatatttcccctaatttttataaaggaataaatccttttataataaaatacaatctgcacactatatgggggtttcttcatttttttttatctagtaagttgagttttagtgaaaacatggcatacagagatagcaatttgttcagacatttctttccagacaagttaaacttttgttatgaactatgccacacatacagaatgcttgagtaatatgtgagattgttttgaaacatagacttttaaacttttctggagtttttatatttgacattttaatatttctgtcaaaagtgttattaatcatatcagaaagtaaatggaaaactgtaaaggtttggggcaacattaacttctttcagaacatgttttagttatgtctacacagcattttcagctgtttccagaatccttggaaattctgttctaatccaaagcatctatcaagtgatctatccatccatccatccatccatctatctatctatctatctatctatctatctatctatctatctatctatctatccacacacaaacacacacacacatacatatatatgtatatatatgtatgtatatatacatatatatgtatatgtatacacacatttacaaaaaatataaatacatttataaaagttgaatgggtgattatgacagcaattgttacggtcaagaattctaatacaatatagtccaaaaatagactgtattgatatttacatgatgggaaacaataagaaagtattaatgtcttagatttctgtaattaagcaaacatgatcccgtgatagtaacaaattatgtgtataaatgaaaacatttcagtttattgcatacattgactcagagccaacatgctgcagtcattgtgcatctgtgtgagttatgtgtaaagtcacagattggtgcagtgaggtcacatggtacaatgtggtttagcatggctagaaaggactttgattcactatgaatttggttttgaaataatcttggtttttcatacattcaggaacgcctctgtctgtctgtctctatctgcctctgtctttctgtctctctgtctctgtctctgtctctgtctctgtctctctctctctctcattgctagttatttgtaacataagattatatgagtccatgtgggtcatagtccacagttcaagaaactgttgcttgggagttggagaggaggtggctcagcagttaaaaacacaggctgttctggagaaccctggtcatattctcagcaccatccaggccaattatttgcaaatctagttctggataatacaatattgtattctaacttcagtaggcacgaggcacataagtgatacacaaacatgcaaccaggcaaaacacacatgagcaaaatacaatgatgattaaacatcgtattagtcagggttttactgctgtgaacagacaccatgaccaaggcaagtcttataaaaaccaacatttaattggggctagcttacaggttcagaggttcagtccattatcatcaaggtgggagcatgacagcatccaggctgccatggcacaggcagagctgagagttctatgtcttcatccaaaggctgctagtgaaagactgacttccaggaaactggggtgagaattttatgcccccacacacagtgacacacctattccaaccaggtcacacctattccatcaaggccacacctccagatggtgccactcccaggtccaagactatacaaatcatcacaaacgtgttcaaaggaagaaaaagaagctgtgtttcatactagcaagtttccaaatggacagtgatctaagttgattcatgacaggctgatcactgagtcatctcagcaaagggggctctgtctgtggacgatgtggctgaggttgccattgactaacaagatgttctcaatgaacaaaacattatctagatttatgttatacagtcatatgattgcaaaccaatgttttagtaggttttttttctaaattattgtttttgttcctcactctctttcttatctctaatgcccagtggagcagatgccttgtcccagtagtgcgcagagaatattggttgaatttgttctgaatttgaaattagttttcttctgggaagaaacgttatggaggaagacatttatatattattactaggtttttatagaaattgacatttataagttcagacataataaaaagtagacaaaactttattatgactttaatatattaggggcaaaatttgaagttttgagtcatatgttttcagacaagtaggtaaaaggactgctatcaattcaaatgaccatttactatttgaagatttatttttaaattatgtttatgtatgtctgtgtttacttgtatctgagtgcacttggtcatagaagagggtgtcagacttcttgtagatggacttgttcaacttgcatcctgagatacaaactcaagtctttggaagagtaccaagtgttctcttaacccctgaatcattgcttgctccagctcccaaaatatttttttaatagtttacaaagtaggtggttcccttatgacattttcatataaatggtaattgctggttgccatttactcccccctcctcctctcacccatctttcctgcttcactactgtcccatgtactttttagcaccctgtattctctctgccattttcatgtcacatgtattgttatccttcccacgtttcttcattaaggccaccacattccccttccctgagccttttcttgcttgcttgcctctacatatccttacttccacataaatatgcacacataaaaataagaagcttaatctgtgtgaagagggcattttaaacaatatattcaggatttttcttcagggaagctttgaatctccaggggtttaaatctctctcagacaaataatgaattattttatctatctatctatctatctatctatctatctatctatctatctatcatctctcagtctgtgtatctcacacacacatacacacacatgcatatatatgtgtgtgtatatatatacatatgcatatatatatatatatatatatatatatatatatatatatagtgtgtgtgtgtgtgtgtgtgtgtgtgtgttcatatgcccatgcatgctcatgcatacatgtattcagatatccctgcaagccagagtagggggtagagtctcctgaggctagattttatgggctgctgtgaactataaaacttgggtgttgggaagaaaattcatgttttctataagagcagagggggaatcatatatttttgaagactaaaagtgtattctggacttacacagattagtgacatgttctagggacaataagcagacatcagcctcatggtccagtggcactgtgaatgatattgagctaattgattgtcatcaaatagctggctttgggaagatgatatacaaaacaaaaggcaatacttgttgttacattccaatcaaagttgaaatttattttctgaatatttccttacttaaatttgtgctattagcctttgttatgggatttgaatgatataatttttcccttcttgtgtgatttattacacctattgtagtcctggattttgacagcaaatgatacttaagtgtctcttcctgttgttgtgataaaataccctgacaaaagcaactcattggagaaagtctttattctgcctcttagctcaaggtatagttaaacattgtggggaggtaaaagcagcagtagaagcctgaaacaactggctacatgtattcacagtcaagaaacacagagcaatccgtgtttcctagtgctcagctcacgctctctattttctagatcctaagggaatgatcctgcccacaattggcatgagtcttctcaaatcaattagcaaactcagttttccacagggataccagagaacagtatgctaggtgactctggacttttttaagttcacaactaacactaccatcccaaatggtgtccagttttcttaaattttagttatctagtgtcttagtgttttactgatgtgaacagacaccatgaccaaggcaactcttatcaggacaacttttaattaggcatacaggttcagagattcagtccattatcatcaaggtgggaacctggaagcatctaggcaggtatggtgcaggactagctgtgagttctacatcttcatctgaatgctgctagcagaatactggcttccaggtatacaggacaagggtaataaagccgatacccacagtgacatctactcaaaggccacacctactcaaacaaagtcacacctccaaatagtgccattccccagaccaaacatatacacacaattatccctaggatgaatctctattgctattctaaatccatctgggctactaacttcatgtcatatgcgtatctgattcttttaagttttttacagctgatgattcttttaaaaccacccatcagttttattcatttatataataaatcttattaattttccttctcacttccctccttcatttccctctctaatatcccctctcactggagcccatattcaccaaacatccctgctactaccatatcttttctctgtgtgtgactccctgagtttaatttgtgctgttttccagatcagtggtgggaaggtattcagtggcacgaggagaacatttctgtggctataccactgaagaaaatgacatctctcctccaacaagcatttgtcatttcagtatgtatggagcttcatggatctttcctgcattcttgatgaaattgaaatgggcccaagattatgcaagtcttgggtgtatgaccatggctgcagttgtgcttctataaagattatctgagaattctatccagttttctccaaaacatatagaagggtctgtggagatggctcaataattaaaaatgcttgctgctcttgcaaaggactcaagcccaattcccagaatgcatgtctcatggctaataactactgaaaggtcaactccagggaatctcatgccttctttggcctttacagaaactgtgtgcacatgcaagtagctacagatagacatacacactctcatatgtgtgtgtgtgtgaacatatgtatgtgtgtgtgtatgtgcacacctctgtgtgtatgtttgtaaatccatagacaactgtaacatctctatccctaaagtgtagaggttaatgtaccaagatagccctggaatgtgatgctaacaaccaatctgtgcaactttgggtcacttctactcagctgtactgtgactaagatcattttttacatctgtctacttagttccccaaacttccgtttcccttctacagtttcctctttgcaaatagggaagttcttgtttcgtttcaatggaagatatagaagttcttttaatgaagtaagtcttcaactcatatgagaatggtgtgaaactttctttttcttctgaagcagagctccggtaggtatgtgttctgtagctccccaacccctcacagtgcctactagttagaagtgaggcagaaatcccactgagtaattgtttctaagacaccacagacatgaaagctggcagaagcggatgcctcttcctcagaggagctcatttggtaatgctgcaggatggatgcagctgtgaagtgaaattcccattgcagctgtgactaggaaatcacgtgacctcagaaacaggatagactcgtaggaggaaacatagattctcactttggcaaactgcctgtaacagtaactttatttattttccttgagtcaaggcctcatgtaaccctggctgaccttgaatttgatatatagctgaggataaccctgaatgaatgcctcatccttctgtctccacctgggactacagagagcaaaaactactacacatggattatgtggtgctggggtcggacccagggtttcatcatgctaggaaagcactccaccaactatgtagtatcccatgcttgtccatcttaaaaggtttgccatttcaactgtacttaatattattaatggtgatatttgttgctatcaaaactccacaagtaaaggtattttataaataataattggatgaatagatatgtaaatatactttatttacaatgatataaccaagaaataaatatataccatcaatattcactatactatgctagaaatcttaaaatactacaaagatctgaaaaaactagtttttctaaattcaaaacatgccattttccaaacaaggtatttaaaattggcatgagatttataagttaagacaaagttctatgaagcagacttactcggtactaaacttatgcatttttctttttttcttttttattagatattttcttcatttacatttcgaatgctatcccctttcctagcttcttctctgaaagttcctataccctcccccctgccctgctccccaacctacccactcccacttccttaccctggcattcccctgaactggggcatagaatcttcacaagaccaagggcctctcctcccattgatggccctctaggccatcctctgctacatattcatctagagacacaagctctggggtactggttagttcatattattgttcctcctatagctttgcagacccctttagctctttgggtactttctctagctcctacattgggggccctgtgttccatccaatagatgactgtgagcatccacttcggtatttgccaggcaatggcataacctcacaagacatagctatatcaggatcctgtcagcaaaattttgctggcatatgcagtagtgtctttaagcagatagtctatgacatagcagaattcatttagtatttctagcatcgtttctctatacccaataggatcttctgtgtaaacattcatatcatgtataaataaaggttgattttagatctttggttttctaacatctgacaagcaaagattaatgtataattttaattattcatattttattatatttttaaaaaatcattacttttttatatttaggaggtatgtgtatataattaagaagataatctgtgggagtctgttcttttcttctaccatgtgaatcgccaaaaataaactttggtgatcatgctgagccatcgtgacagtaccttagctcatgttttatatttataattttacaaaagtagaaatggataaaaacaggatctttcaaaagagtattttctctcatgtggtatactagttatctttatgttgctataataaaataccgtgacaggaagcaacttatggaagaaaaagtgtattttggccttcagttccagagggaaattccgtaacaatatgagaagtttagcagtcactagctaaagcaaaactttgagatatctcacctcaactgtatgtgcaggaaggagagagaggatgagaaagagagagagagagagagagagagagagagagagagagagagagaaagtgtgttataactctcaaagctccctcaattcagtacttcctccagcaagcctgcctctacattctggctcataacttacccaagcaaccataccaactggtgactaatgtccaaatgttccaatatgtgaggccacagaggatattcctcatcaagccactacatatatttattgctatggagtgcatcttacaagagagcaaccttgaacccgactctcctctacaaatggacaatcccataccttcaggctctccttaaagttgcctaaactgtaccagatccttctgaactatcaaacctctgtattctttggttgcgagagaagattaaggtctactttgaagccattgtttttaagcaaaaagtttgcaaattttaagcctctttgctcatttttcttgttggtagtatgcattttcaagcttgtaccttgtttcctagcttaaacttcaaagggttaacggggtattaaaatactgcaggtctgcttaaccatattaggctttaatgataacaaccagtacacagtctacagtaagcttctcagagcagctccagtctcacttagcatttatttcttaattaataatgagtcctcttcatgtacttctttattctttgtttctttacatttatctagctgtatctgtatgtgcatgtgtgtccgtgtgcttggccatgtatcaaagtgctggcaagaatagaaaacaacacataagagtacattctccccttctaccatattggaacaaagaatcaaccgctggtggtcaggcttagtggccaatgcctctactcattgtgccatcctgccagcctatcttcttttctacctggattttataatctgaccatagtttctctcttagagctgggtctgtctcagcttattctattcaaatcttatttctgaccctgccttattgccaagagaaaaatgtaatgacgctgccatttctggggctgtgcagagcttattcctgtcagtcaatgctgggattccagtttgtcttctttgaagcatacaacagaaaatattaccatctgaatagtattaatttatctcatacttattccaaaatatatcagtgaaaagctataaaaatatagcattcaacttctcaataaataatcttgttgaaatttacacagtaagcaagcaaggtctgcagaaaataattccatgagatattctgcccttgctagattgtttcttctctattacatattgcttgttaatggtttggagttttgtaatgcaaaaataataagtattcattcttaataactatttctgctttctagatcatgaatattggagatgatatttagttaaatatttaggctcaggtttatgtcagtctggaaactgttgttagcaagtaaggaaggaaaaaaaaacccactgggctgatacttattaccttttataaagggggtgtgttggctgtatgaatacctttgtgtctgtctttccttattttatgtatgtatgtatgtatgtatgtatgtatgtatgtatgttagaggacctcttgtgggagtttgctttatccttttattgagtgggttttgggaataaatccgggccatcaggcttcagagcaagtttctgtgttcactgagatttcttgtaagccttaactagattggttctaatcaacctgatattatttataattgtggatttcttagcatgagcacatgtgtgcgtgcacacacacacacacacatacacacacacacatacgcagagagagagagggagggagagagagagaatatttgattgtgattatttgattaattctcaatcatagtttctatgaattctggggcattagtacatttggggtgctgaaattgaacttacctttataatgcaaacctcctgtagcattctgatttctgtaaactagtcatgtttctagtagagtaactcagctgagtcatagtgcattgcctcccaaatccttgtcagtatttgtttataatccctaagtggtcttaccgagtcttatcacctcattttctgacctgtcagagctttaggtatcaagtgtgtgtctttccaaacttttagtgaacatctcatgatgttttgagggaaatatgttaaccagtttctatggtttcttttgttggcactgtaataaaatactctgacaaatgcatctaacgggggaaaatcacctgtttcagcttatagttcaaggttacagtccataatgacaagaaagtaaaaacaggagaatgttgaagcggcttgtcacatgacagccagtcacagggcagcaacagttattaagcagatcccaatgatgaatgcttgtattcagctctctttctgcacttagctcaggatcccagccagggaatgttgctatgtacaataggtgagcacagtcacaaaatcttccaaatacatggccaagtgattatagatttatcaagttgatatgtaacactgaacactgtagggcatgtggaccatgccaccaggtggacatgagactggtgaagttgagcatgtgcaaaccctggtatctcaagaggtttgagatgccaggagaggggctgctctcttcctgcttccatgcctcctctggaacatgtaaccatgactctcaaccaaggtggccatgggcagtcagtcagtcatatggcacagcacctggaatgctgtcccatttcaatgaggtatctcaatagccttagccttcagccaatgaccttatatttctggatatgctcatgcccttaccctaaattatatactcccttgttcaccccaaataaagcgtatgtatctaaatccacatccagtagagaaagagaaacaagatatcatctcagagagctgcttcattaaggattgcaacgggaagtaaagtattctactgaagaagccgtaaggttaaaactcacaaagaaggctttctctattctctagctcctctggcacttggtacttgctcccaactatatttccatccttctagtcccaggatctgatctcttcttccagcctggaacacagcagcaccctgataccccaaaagggagccccagtctgtggttccccattctggactttttgtcctgagccagtgtatctgtgtcatctggacactgccagaggagaggcagaattcaggaccacagacccccacaccatttatgataaaataaaacaaaagcagtttagagctcactgaagagaaaaaccagtgtattttgactgaatgtgttgcctgtatttgtactggtctatgtatggttgattgtgtggaagaggtggacggaggcagagcaagggagagaaacagtttgtgtatagtctgtatgttttgtatatgggagtgtgttcaaatgaatcattagaaaaatatgctcaaatatgggtgcaggaaggaagaaaaggtttaaatcccatgtcttttaaacatgtctctaaggcaccagggagagaaagaggcactgtaaggaccaatgggtgatcaatgagctataggaattggttttaaatctttgtcagattaatttctcatttattctctggaccatttacctttattctttttccccttagtgcatatcatgctctaaaattgaaaccattcctcaccattttatcaagccctcagcttctcatggcatttcctactcattgtagtttttataattaatttaatttactatttgacaatttcaggtgtgtatatgatatattttgattaatctcatccttcactgtctctcccaatcataccaactttccttctctctgtgtgtctctttctcatagttaggtcatttagatttgttttgtgagccccatcctgggtttaatcaggaccatctagctgaagacaagtgctcccctcctttgtcatctgttaacacccttaattcctcaggtgggggggtaaggctccaggagctgaaaactccaggtttatgcaggcccagtgcaggctgcctcaagtgctgtgagttcagtgttaaaatggctgtggcttgcccaggagataagaatgtcacagccattttccatatcacttttggattacttctgtctcttcttttgtgatattccctgagcttttgaaggagtggcattaaatgttctttttagggctgatcacttattcttagcaccttgagcagcctgtggtggctctgcagccatggctcatggtgctttaacagctgaagtgtgggcttgtaactaggtttcaccaagttagctttctttgttccgtttttttttctttaatcacattaattgattcctgtattttcgatgtgtgagtatgcatggcacatattcatgtgtgcacgcctgtaggcaagtgcaaaagccagagaaggaaaggatgttctccactatcacattaatccttattctgctgaggtagtgtcactcctagaaactagcattagactgtcagccagcaagctgattctctggtctctgccacccagagatctggagttacaggcacaggtggctacagatggcaattttatgtgggtactgaggattcaaacactgggtctcctgcctgaatagcaagcactattacccagtgagtcatcttcccagcctttatattagttagctttctacaatattccatctgtaataacccagtgttttaaggatctaactctgattgtcttattcactccccactatacagtcttaagagttccacatgaggaagtcaatactttgggaatatagtcaccaaattaggataactggcagaataggcccaataagtctttctatggtgacattcatacccccacctggtactggctctcacattatccaggaagtccccactgtgctaattgtttgtgaaaggagcatcaacacctgctgctctgagcatgaaagatacagctcctattgtgttggaacatgttgttgctcaacatatgtctgaataaaaataatgttgaatatgcaacacagaagaacaaaaggcagagtatattaggaagggactttatttccttgttaatttgttctaaaaactcctttatgtgtttcttaatgtccggtgatgtttgcaagttatatggtgacctttctgcacagaattccagccacaaggcattcctttgtcagaggaaagccttttcatttccttgcctgcaagctgtaccacgctcagcagattaaagatcgattgctctcagcaagcaaagagcaatgttaagttcatcaaccccctagctgcctctcattctgcttaagaagagaatagaaagtctccctctctgctgtcctgcacactaggatctaagaatgaaaccgtagaaataaaacccaagaacaattaagctgtagttcccaagtgtaattatattatggttgtttctgcttgctttatatccctatatacaatttatgattcaagtattagtgggaatagactaatggcatgtcataattaatgaagcgccttctctgttttttgtttcctttgtgcttctagtttgctttgttcaacagaataagatgtttatgttaatttttatgcatgctgtagttaggcttctatatattatttagggaagcttctacattagcactaataaataaactgttgggttttaaatcatggtctgtgcactacctagtttatttatatttattcctttttcattactgcaggaggaaacagaagccgtgctttatttttataataaaacactctgagaagagttattatggaccctaacactcgtatgcaaacatcattaaagtttacacagcgaaggtttttaataacatttggagagattttggctgatgccttttctgtattaatatttccacatccggatacaatggctgaatattatcctcactaggaacctaggaaacccttgtgttatttgtaaatgaagacttgacagtgttttgccaaggtttctgtttgaggtatgcatagcaagacacatttctttcacattgtgattttaaagaatctttctgtgtcaggaaactgatggagtttaaagtggaaagaggtctgaaagttgaaccagtattgactctttctatgtggtgactgcaacagagttttggaatgaaaatatagtaggtgtggaggaaggaggtgaagctgtggattaactgtggtagcaaaaagatgacagaaaaggaaaaaaaaaggtatattattaggttcttattattaaaagtgttcatgggttgctgaaacacccatttgtaaagtatgtgctccgcaggtatgaaaattgccagaacccacctaaaaaactcaggcctcatggtttgtacctccaatcccactgtcagcatagcagagacaggaagatccctggtgtttgatggccagccaacttacccaaatctatgagctcctcttttaatgagagattctttaatgagcgtcttaaaaagcatgtggagaccaagcaatatactcagcattgattcctggcctcctgctagatgcacactgaagtttatgtgtatttacacccacatgcacacacattcacacacatcacatacatgtacacatacagatacacggaaacatacatacacacacatgtactggcctttaatccactcattaattaatgaatcaattcattcattcattaatgcttctaacattagatgaattttaatatcagtatatcctattcataaacattttaacatatatgagaaatgctgattttatatttatctatttggtataaagcttttgttgcaaaatttacataaactctgacctgaagtgtgcatcccctatattagtctattttaaattttagaacatgacacctcagctaccttttggccaattcctgacataatggtatggtcacctttgttgttctctataaccataaagtatgtgtgtgtgtgtgtgtgtgtgtgtgtgtgtgtgtgtgtgtgtgcctgcatgtgtgtgtttgtgtgtatctagacaggaaaatgtgataaaactagtattaaagaaaagaagcattcattttaaaacctaggaaatgacattgtaacattatccaactttgttttatgtatgaaaactttcataatataaaataatagtgtgaaactacctgataaaaagcttaaaaacatctataaggttatgaagacaagtctggctgaaaattaagttattcagagaagcattttgatgaagtcatatgtctataaacaatattcaattgtgctaagtcagcagtattttgaccttgtcaggatcctggactggaagcaatatttatttgatcaagactgtccaatttgggggctgggtgtgatgttcactgggaagacagctgccacgctgccaagaatccatgagaccatgtattttaatccttagcatggctatagcagacaagnnnnnnnnnnnnnnnnnnnnagagagagagagagagagagagagagagagagagagagagagagagagagagagagagagagaggaaagacaaggagaaaaataatactcattttaatatgttcttttaatacaaaagtgtcatcttatttttcctatggatgtgataaaatattctgaaaagagaagtgcttcttttggcttacaatgctttagaatgcaagccatcatggcagagagagagaagccttcatagcaggggcaggtagcttgatgtttgtcctgcatccccaggagaaaaccatgagccaacagaagtggctccagactataaaaatttccaggcatgccttcgaggacccacttccttcagcaagactccattttctaaaggtctcgcaactttctcaaatagtgtaaaaaactggggacctcatgtttgaacagtctatggagacattttcaccttcaaattacaacagaaagtgttcctgatctgtaattccttggtagaaaattatctgaggtcccatgatactgatctatggcagatcagatgtgcagtagcagtatttccatttgaagtttctgtttctgggtagagattctttgagatgactggctgccattttggtaagttatttgagtctacaaagctaaaaatatatttgggatgcgctctaaaacaaggatgagaaccaagttgcaaatagcctctaagtagaagagattgtctcagccctaaaataccagggaggctgcaatgtaagcgtctctttatggtgatgtagtgtatatttaggagaaagacatttctttttctctctaaatcatggtttcttagtagtcatgaatatgtagtgacattattagtcattttctgaatatcccagtgctacctgggaaggaagttgtctatcaggccaaggagcattgctctctgtccttaatggagatggnnnnnnnnnnnnnnnnnnnnnnnnnnnnnnnnnnnnnnnnnnnnnnnnnnnnnnnnnnnnnnnnnnnnnnnnnnnnnnnnnnnnnnnnnnnnnnnnnnnnnnnnnnnnnnnnnnnnnnnnnnnnnnnnnnnnnnnnnnnnnnnnnnnnnnnnnnnnnnnnnnnnnnnnnnnnnnnnnnnnnnnnnnnnnnnnnnnnnnnnnnnnnnnnnnnnnnnnnnnnnnnnnnnnnnnnnnnnnnnnnnnnnnnnnnnnnnnnnnnnnnnnnnnnnnnnnnnnnnnnnnnnnnnnnnnnnnnnnnnnnnnnnnnnnnnnnnnnnnnnnnnnnnnnnnnnnnnnnnnnnnnnnnnnnnnnnnnnnnnnnnnnnnnnnnnnnnnnnnnnnnnnnnnnnnnnnnnnnnnnnnnnnnnnnnnnnnnnnnnnnnnnnnnnnnnnnnnnnnnnnnnnnnnnnnnnnnnnnnnnnnnnnnnnnnnnnnnnnnnnnnnnnnnnnnnnnnnnnnnnnnnnnnnnnnnnnnnnnnnnnnnnnnnnnnnnnnnnnnnnnnnnnnnnnnnnnnnnnnnnnnnnnnnnnnnnnnnnnnnnnnnnnnnnnnnnnnnnnnnnnnnnnnnnnnnnnnnnnnnnnnnnnnnnnnnnnnnnnnnnnnnnnnnnnnnnnnnnnnnnnnnnnnnnnnnnnnnnnnnnnnnnnnnnnnnnnnnnnnnnnnnnnnnnnnnnnnnnnnnnnnnnnnnnnnnnnnnnnnnnnnnnnnnnnnnnnnnnnnnnnnnnnnnnnnnnnnnnnnnnnnnnnnnnnnnnnnnnnnnnnnnnnnnnnnnnnnnnnnnnnnnnnnnnnnnnnnnnnnnnnnnnnnnnnnnnnnnnnnnnnnnnnnnnnnnnnnnnnnnnnnnnnnnnnnnnnnnnnnnnnnnnnnnnnnnnnnnnnnnnnnnnnnnnnnnnnnnnnnnnnnnnnnnnnnnnnnnnnnnnnnnnnnnnnnnnnnnnnnnnnnnnnnnnnnnnnnnnnnnnnnnnnnnnnnnnnnnnnnnnnnnnnnnnnnnnnnnnnnnnnnnnnnnnnnnnnnnnnnnnnnnnnnnnnnnnnnnnnnnnnnnnnnnnnnnnnnnnnnnnnnnnnnnnnnnnnnnnnnnnnnnnnnnnnnnnnnnnnnnnnnnnnnnnnnnnnnnnnnnnnnnnnnnnnnnnnnnnnnnnnnnnnnnnnnnnnnnnnnnnnnnnnnnnnnnnnnnnnnnnnnnnnnnnnnnnnnnnnnnnnnnnnnnnnnnnnnnnnnnnnnnnnnnnnnnnnnnnnnnnnnnnnnnnnnnnnnnnnnnnnnnnnnnnnnnnnnnnnnnnnnnnnnnnnnnnnnnnnnnnnnnnnnnnnnnnnnnnnnnnnnnnnnnnnnnnnnnnnnnnnnnnnnnnnnnnnnnnnnnnnnnnnnnnnnnnnnnnnnnnnnnnnnnnnnnnnnnnnnnnnnnnnnnnnnnnnnnnnnnnnnnnnnnnnnnnnnnnnnnnnnnnnnnnnnnnnnnnnnnnnnnnnnnnnnnnnnnnnnnnnnnnnnnnnnnnnnnnnnnnnnnnnnnnnnnnnnnnnnnnnnnnnnnnnnnnnnnnnnnnnnnnnnnnnnnnnnnnnnnnnnnnnnnnnnnnnnnnnnnnnnnnnnnnnnnnnnnnnnnnnnnnnnnnnnnnnnnnnnnnnnnnnnnnnnnnnnnnnnnnnnnnnnnnnnnnnnnnnnnnnnnnnnnnnnnnnnnnnnnnnnnnnnnnnnnnnnnnnnnnnnnnnnnnnnnnnnnnnnnnnnnnnnnnnnnnnnnnnnnnnnnnnnnnnnnnnnnnnnnnnnnnnnnnnnnnnnnnnnnnnnnnnnnnnnnnnnnnnnnnnnnnnnnnnnnnnnnnnnnnnnnnnnnnnnnnnnnnnnnnnnnnnnnnnnnnnnnnnnnnnnnnnnnnnnnnnnnnnnnnnnnnnnnnnnnnnnnnnnnnnnnnnnnnnnnnnnnnnnnnnnnnnnnnnnnnnnnnnnnnnnnnnnnnnnnnnnnnnnnnnnnnnnnnnnnnnnnnnnnnnnnnnnnnnnnnnnnnnnnnnnnnnnnnnnnnnnnnnnnnnnnnnnnnnnnnnnnnnnnnnnnnnnnnnnnnnnnnnnnnnnnnnnnnnnnnnnnnnnnnnnnnnnnnnnnnnnnnnnnnnnnnnnnnnnnnnnnnnnnnnnnnnnnnnnnnnnnnnnnnnnnnnnnnnnnnnnnnnnnnnnnnnnnnnnnnnnnnnnnnnnnnnnnnnnnnnnnnnnnnnnnnnnnnnnnnnnnnnnnnnnnnnnnnnnnnnnnnnnnnnnnnnnnnnnnnnnnnnnnnnnnnnnnnnnnnnnnnnnnnnnnnnnnnnnnnnnnnnnnnnnnnnnnnnnnnnnnnnnnnnnnnnnnnnnnnnnnnnnnnnnnnnnnnnnnnnnnnnnnnnnnnnnnnnnnnnnnnnnnnnnnnnnnnnnnnnnnnnnnnnnnnnnnnnnnnnnnnnnnnnnnnnnnnnnnnnnnnnnnnnnnnnnnnnnnnnnnnnnnnnnnnnnnnnnnnnnnnnnnnnnnnnnnnnnnnnnnnnnnnnnnnnnnnnnnnnnnnnnnnnnnnnnnnnnnnnnnnnnnnnnnnnnnnnnnnnnnnnnnnnnnnnnnnnnnnnnnnnnnnnnnnnnnnnnnnnnnnnnnnnnnnnnnnnnnnnnnnnnnnnnnnnnnnnnnnnnnnnnnnnnnnnnnnnnnnnnnnnnnnnnnnnnnnnnnnnnnnnnnnnnnnnnnnnnnnnnnnnnnnnnnnnnnnnnnnnnnnnnnnnnnnnnnnnnnnnnnnnnnnnnnnnnnnnnnnnnnnnnnnnnnnnnnnnnnnnnnnnnnnnnnnnnnnnnnnnnnnnnnnnnnnnnnnnnnnnnnnnnnnnnnnnnnnnnnnnnnnnnnnnnnnnnnnnnnnnnnnnnnnnnnnnnnnnnnnnnnnnnnnnnnnnnnnnnnnnnnnnnnnnnnnnnnnnnnnnnnnnnnnnnnnnnnnnnnnnnnnnnnnnnnnnnnnnnnnnnnnnnnnnnnnnnnnnnnnnnnnnnnnnnnnnnnnnnnnnnnnnnnnnnnnnnnnnnnnnnnnnnnnnnnnnnnnnnnnnnnnnnnnnnnnnnnnnnnnnnnnnnnnnnnnnnnnnnnnnnnnnnnnnnnnnnnnnnnnnnnnnnnnnnnnnnnnnnnnnnnnnnnnnnnnnnnnnnnnnnnnnnnnnnnnnnnnnnnnnnnnnnnnnnnnnnnnnnnnnnnnnnnnnnnnnnnnnnnnnnnnnnnnnnnnnnnnnnnnnnnnnnnnnnnnnnnnnnnnnnnnnnnnnnnnnnnnnnnnnnnnnnnnnnnnnnnnnnnnnnnnnnnnnnnnnnnnnnnnnnnnnnnnnnnnnnnnnnnnnnnnnnnnnnnnnnnnnnnnnnnnnnnnnnnnnnnnnnnnnnnnnnnnnnnnnnnnnnnnnnnnnnnnnnnnnnnnnnnnnnnnnnnnnnnnnnnnnnnnnnnnnnnnnnnnnnnnnnnnnnnnnnnnnnnnnnnnnnnnnnnnnnnnnnnnnnnnnnnnnnnnnnnnnnnnnnnnnnnnnnnnnnnnnnnnnnnnnnnnnnnnnnnnnnnnnnnnnnnnnnnnnnnnnnnnnnnnnnnnnnnnnnnnnnnnnnnnnnnnnnnnnnnnnnnnnnnnnnnnnnnnnnnnnnnnnnnnnnnnnnnnnnnnnnnnnnnnnnnnnnnnnnnnnnnnnnnnnnnnnnnnnnnnnnnnnnnnnnnnnnnnnnnnnnnnnnnnnnnnnnnnnnnnnnnnnnnnnnnnnnnnnnnnnnnnnnnnnnnnnnnnnnnnnnnnnnnnnnnnnnnnnnnnnnnnnnnnnnnnnnnnnnnnnnnnnnnnnnnnnnnnnnnnnnnnnnnnnnnnnnnnnnnnnnnnnnnnnnnnnnnnnnnnnnnnnnnnnnnnnnnnnnnnnnnnnnnnnnnnnnnnnnnnnnnnnnnnnnnnnnnnnnnnnnnnnnnnnnnnnnnnnnnnnnnnnnnnnnnnnnnnnnnnnnnnnnnnnnnnnnnnnnnnnnnnnnnnnnnnnnnnnnnnnnnnnnnnnnnnnnnnnnnnnnnnnnnnnnnnnnnnnnnnnnnnnnnnnnnnnnnnnnnnnnnnnnnnnnnnnnnnnnnnnnnnnnnnnnnnnnnnnnnnnnnnnnnnnnnnnnnnnnnnnnnnnnnnnnnnnnnnnnnnnnnnnnnnnnnnnnnnnnnnnnnnnnnnnnnnnnnnnnnnnnnnnnnnnnnnnnnnnnnnnnnnnnnnnnnnnnnnnnnnnnnnnnnnnnnnnnnnnnnnnnnnnnnnnnnnnnnnnnnnnnnnnnnnnnnnnnnnnnnnnnnnnnnnnnnnnnnnnnnnnnnnnnnnnnnnnnnnnnnnnnnnnnnnnnnnnnnnnnnnnnnnnnnnnnnnnnnnnnnnnnnnnnnnnnnnnnnnnnnnnnnnnnnnnnnnnnnnnnnnnnnnnnnnnnnnnnnnnnnnnnnnnnnnnnnnnnnnnnnnnnnnnnnnnnnnnnnnnnnnnnnnnnnnnnnnnnnnnnnnnnnnnnnnnnnnnnnnnnnnnnnnnnnnnnnnnnnnnnnnnnnnnnnnnnnnnnnnnnnnnnnnnnnnnnnnnnnnnnnnnnnnnnnnnnnnnnnnnnnnnnnnnnnnnnnnnnnnnnnnnnnnnnnnnnnnnnnnnnnnnnnnnnnnnnnnnnnnnnnnnnnnnnnnnnnnnnnnnnnnnnnnnnnnnnnnnnnnnnnnnnnnnnnnnnnnnnnnnnnnnnnnnnnnnnnnnnnnnnnnnnnnnnnnnnnnnccccctcccctgcctctatgagagtgctccaccacccactcactcttgccttcctgggctggtattcccctacactggagcattaaacccccacaggaccaagggccactcctcccactgatggccaaccaggacatcctctgctacatacatggctggacccatgggtgcctccatgtgtactctttggttggtggtccagtcctcagtagatatgggggggatctggatatttttaacacttaattaattaattaattaattaattaattaattaaatttattgagagaccatctctcactgaacccacatcttggtgcttgactaacatgactggttaggaaccacagagctcctcttgttccttcctccccagtgctatgtgtggcttttatatgggcatcagggattgaactcaggaccttatgctttcaaggcaagcagtttactgactgggctatctgtaagtcccttgttttactcttctatctcattgttatataaccatgtaatttagataggcttttggtaagaagtaaatagtgcagattagttcattcagaaatgagagactttagcaacatggggtagtggtaaagaaatatatgcaataagcagaaatacaagcagaataagtttttggtagtaatcaaaacatttgtgagaaagagacagaggggttgtactatggtctcatttcctataaaggctcatgcatgatagatgatgcagtttggatatagttgattctcatcaatatgaaagatgaatatcaacattgagcaacatagggaactttcaaaaggttgaatgcttttctaattgtggcaagcctgtttctctagatacctgtattcttcctcacaaacccatgtccccatcttgttctttttctccattcccatcttaagttgcaccaacctgaagtactcataaaagccaagaagatgcagttgctcctccagtccttcagcacttttaactaaataactttcttcatacagtactcagctttggatattttcttagagcatcatgaagccccccccccccccgaaaaaagccagcactgagcacccagtctgctcatcaccagtaagcctgctctcttctttctcctcacttctcattctttctccttcccttcctcatcctcttcttctcccctctaaactcatctatccttccctagaatcacatttacgataccctgacatcaaagattatgtcaattaatggtgattatcttggttgtacttccccagtgcttggattacaggcctgcaccatcacaccaggtttagccactctcttcttaaagaacttggaagggtgatagagttaaggcttgatatcaagttcattgatttcctctgacagccaaattgaagcaaagagatagattttttaaaaaatctgacgtgaaaaataaaaaataaaataaaataaaaattgacagtaagtggatggaaccatccctcaacctggggccttgcctaacctctggatatggtctctacaggttctccctctcttttgttaggcatttcatctaatgttatcccccatgggtcctgagagcctcttgcttttcttgaatctgggactttctggtggctacctccagttccctatccccaattgctacacacctgtgttcattttcctgactctctgtatatcatctccatctcctcccatacctgatcctgtccccattttattccctcaccctgcctcttcctcccaagttttcctctgaagatgtatggggaacaatctatttttaaatagtagaacggtggggacattctggggactgttgagaattctggctactctattcacagagaatgggaaaataagaaggctctcttccatctatgaattgaaacattgactggctttgagggcactccttgcctgacttcacacacaaagcattttagctagagacacactcttctagccagagtaaacatgatccgtgctgcatacttacaagagaatttgaaactcgccttgcgtttatttaatttttcctggtccatggaatttctgaaaatagaaaactattttattctagatttaaataaaggtctctgtaatcttctgcactcttaactggataatgagcattcctatgtgttatttatgtgtgagaattgactatgatcatcagagtggtgggcatgtgaacaaaaaatataaaactttaaccgaaaggatcatgggaggctgatctgtagacgagaaatgtaattttacattttcttcctttttaagtacctgcacggatctgattaacattttaatagcaaaagcaataaaaaaataattaaaagtacatttagtatctgttctgtcccatttcattaatttttgcttctgtcccctcctacccacagccttggaggaaaagatatataatttgtaccttacctttagctccctcctcagggtacataatttctttacctaaccatatcagtcctagggtctcctatatatattccaagtgtaatttctcctttataaatggcagccctgacattttatctttagctgtaaagtatgttatgtctgatttgtttcagagttgtataataggttaataggtagatgtatgtggaaacaatatttgctttgattttgactcccaagaaagcagctaagtcttctgaagagaggacgccttcctatccacaaggttttttttttttttttggctctgtcctctgatacttggcatttcctcctagcagagggacaccagtcagatgaaaccaggaaggtgttgacttgcaagctgtgatggtacaggagaagaacagttacttaagatgagatcaggttcacttccaatccctgcccccagattctcagtaccatctaaaggtcagttctgttatgaagagcaaattaataatgccagccttgaacgcagcttggagcttcagggctccttggccatttcaaacagtcctgttttgcttaacctttgtttgggatcttaatttgactccagggcaattacaacctttaacttactagccgaaaaggaaacacattgatcattaccttgaaaagacaaaagacggtgggggatgctccagctggggtgatattaaactactcctcacattctcctcttccactcctttaactaggggaggatgaagacagatgtgatctttaccacacttcacaatgaactccaccagggacctctcttctcctaattcctttcatacttaatatcatactccatagagttgagtatttaaaattttattttcctcttttcatgttttttaaaaattaattaattaatcaatatcccaaatgctgcccatgctcctggtccctccttctcaaagtccctcccccaacaccccgcttcacctctgagagaatactcccctctgtatcccccccaccagcatcaagtctcagcaggagattaggttcctcctctctcactgatgcaggacaatacagccctctgctatatatgtgcaaggggcagggtcttggctcagcaggtgcatgctctttggttagtgactcagtctttaagagcaaccagggatccaggttagttgacactattgtcttcctgtggggttctcatccccttcagggcctttgaaggctcctttcatgtttaaggaactgttattattcccttagagtgtatgttattccacactctatgtagagtgaaagttatttgattgcagtaagctacccagtagctcctccctccatctctcctttgctttcccctcccctttctccatcccttcttttctaccttggcttatttctcccatcctccattaaggcagtgtaggaagaagtctaccttaacaatagcccacgtcaaactcagacttcaaaaacctatgtttattttgaattgaaaaatgtcataaactcttcatttcaaaggaactgcagttcctgccttaatgacaattaatccttatggacgactacatgtagctgctatttatttctttaaattggacagatatggctacagagcttaaatcgatagactagagctcacaaacccttttcactatgttactttgtaagaagctcagagaaattatacacaatacaaattctattttgcgtctgaacaacatatgctacatgaaggagttttaaggaagaagtgagaattctgtgacatattggccccatcacataatcccaatgacataaattgaccccatactgctatcattatttgataattaaaaataaataaaagacttattttaattcataaatgcaatgattaacgaatggactggtagggagatcaagctgccagggcttccgtgttctctcattaggaatattccttattaaatttggataatctgaactcaattgagctccctttttaaagatttttaaaagaatttgaaaataaattctgaaagtgacttgaaagtaacttgtggtttgtttaaatgatatgagtggacacactggatacctcacattgtgctgtgctttgaagactagatgaaggcagcttcactctagaaacttttaacaaacatagtagaagattacttttatactctctcacattcaaaaataaattgtataacacttaaagagcaagtggtacagtagacttaacatagcacctatttcaggcatcttacaattacctgtaactccagttccaggggatccagtgctcttccctggcctctatgcttgcctgtatgcacgcactcagacaaacacttacacctaaagcacatacatacatagttttaaaaattagttaattaaatgtaacggtctggtgcaataacaatgtatgctggctaactaaagcagaaatataggagtaccgagctagtctgtaaagaaggcatgcttcccgacttcttcttatcccctcttctcctcatcttccttgttcttttggagacaaagtctcatggagcccaggctggcctccatctggctgtataattcagaatgagcttgagttcctgagctgcctgtctttacttcctaaattcagggactgcaggtctgtgctaccatgctgtgtttatgcagtgctatagatcaaacttaaggcttcctgcaaagcaggcaagggctctatccacttagccatggacccagccctctttcagcatcctatatactgcatggagatgctcctgagatgaactgaaaggtgcacactgagctcatgtggatgtgcctgaatccccacgcagttggtaagtgttttcccctaggctttatattggtattacaaacccttatttttggctcttaatgtgaaaagctgagtaaatgctttagtctcgatgttttgagaatatttggtgtgtatgttacagagctatagcccaagcacctcacctggggaggtttcattcatttgtttttgttttgttttgctttttaggaaagattgctgaactatctagaactagaagaaattctttgcatttgtacattaagtggtggcactgaccctgattagaggagctccaacccctgagaatggttctttagcatgtagcagattctggaaagcctgggaaatctgggaggggcctgcactggttctggagatttgggaagtctggaatgagcagaataatgtttatgtcaagcaagatttcaggcagtgctgatagtggtggtttatgggtcataccaaggtaatattaagaatggtctagagaggcagaaaacaaaaggcctggagaactcaacgctgagagatattagggcaaggctgatgattgggtgatagtgacaccacagggacaaggtaaagctttcagaagacccaggaaaggaacctggagtagctggcagggaccactgtgagggaagggcaaaattgcctcagcacacctgagagcatgtcaggtctgtttcccttgtttaaagatgtgttatgtgtttgtgtatgtctgtacatactagtacaagtatccaaggaagccaaaggaagctctgagatgaggttacattcattgtgagccaccctgggtcttctattagagcatcaagtgctattaaacattgaactgcatctccaggcccaatggtatttctcactggtgtggtgtgtggattctcagctgcccttccctggtcagagaagataatcgggaaaaatcaaatcagatccattcctatatgtgaaactgtatctatgtaatttttttctttaagatttagttttccccggggtccatattaatggagactgctggtcttcctacagtgtttccctcctcctcagcttcttccagatttcccccaattcacagggctcagcagcttctgtccattggttgggtgataatatcttcatctgactctttcatctgcttattgggtctttcggagagtagtcatgattggtccctttttgtgagcactccatagtctcagtaatagtgtcaggccttggcacttctcctcgagctggatcccactttgggcctgttgctggaccttctttttctcgggctactctccatttccatccctgcagttctttcagacagaaacaatcatgggtcagagttttgactgtaggttggcaaccatccctcacttgatgccctgtctttctgctggaggtggctcaacaagtttcctctccccagtgtagggcatctcatttaaagttcctctctttgagtattaagattctttcaccttgccggtctctggtgcattccggagggttcccccttctacctcctgacatctcatgtttccatttatactgctggcatcagggatttcagtcctttttccccccacccaatacccaatcatgttcctctctctgccccccccccacctcttttcccttccaggtcctcccaccttgtgtctactttcttctccctctcaagtgggactgagacaccctcacttgggccctttagctcttgatctttttgagttctgtgggctgtatcttgggtattcagcactaattcttttttattttttcttttgcttttcattttttttggctaatatccacttataagtgagtacataccatgcatgtccttttgggtctgagttacttcactcaggatgatattttctagttccatccatttgcctgaaaaactcaggatttcctcatttttaatagctgagtagtattccattgtgtaaatgacccacattttctgtatctattcttctgttgtgggacatctgggttgattccagggactggctctcacaaataaggccactatgaatataatggaacatgtgcccctgtggcatggtggggcatcttttggatatattcccaagagtggtatatttgggtcttcaggtagatctattttcaattttctgagaacctccagattgatttccagagtggttttaccagtttgcaatcccaccagaaatggaggagtgctcctctttctccacatccttgacaacatgtgctgtcctgtgtggttttgatcttagccatactgattggtgtaaggtggaatctcagggtcattttgatttgcatttctgtgatcactgaggactttgaacatttctttaggtgtttctcagtcattcaagattcctctgttgtgaattcttggtttagttctatatgccattttttgattgaattgtttgggtttttggtggttagcttcttgagttctttatatattttggatattagccctctatcaaatgtgggactagtggattttttttcccaatctagaagttgccagtttgtcttatgctatgtcttttgccttacagaagctttccagtttttatgagttcccatttattaatttcttgatcttgnnnnnnnnnnnnnnnnnnnnagagagagccattggcattctgttcaggatatttctccctgtgccaatgagttcaaggctctttcccactttttcttctattagattcagtggatcaggttttatgttgaggtcctttatccacttggacttgagctttgtgcaaagtaacaaatatggatctatttctatttttctacatattgacagccagttagaccagcatcagttgttgaagatgcttatgtttttccattgtacatgtttggctacttgtcaaagatcaagtacctgtaagtgtatggttttatttctggatcttcaattctattccattgatcaacctgtctgtctctataccattaccatgtagcttttatcactgttgctctgtagtaaatcttggggtcaggggtagtgattcccccagccattcttttattgttaagtattgttttcactattctgttggttttttgttttcttttgtttttgtttgtttgttttgtttttttgtttttttgttttttgttttttgtttccttttgagatgaatttgagaattgttctttccatgtctttagagaattgtgttggattccagagatgtctcagatactggaataccaaccaggcagcacataccagctgatatgaggcccccataacatacacagcagaggactcttgggtctgggtttattcagagaagatacacctaaccctcaagagactggaggccccaaggagttttagaggtctggtgtggtagaggtgagaggtatggacagcctcatggagacaggaggacatggaggaggtatggattgtgaaacagtcagaggatggactgggaggggaataaaatctggagttttaaagaaagaaagaaagaaagaaagaaagaaagaaagaaagaaagaaagaaagaaagaaagaaagaaaatgaaatttagtttcctcccttgtttattgattgattgattgattgattgatttggattggtcatctgctatctagctctggctatctgtgtacttacaaaggcctaaatgagactacctacagctgctggtctctaagtgctgtattttttaagacaattgggcctgcctctgcaggggtgtttaaccttttcatttttaaaatatttttttaaaatgaaaacaaatattttaatacaaagcattttcacacgtaatattttcatcaacagagttcatatgcaaattttaaatttggttataaaaattgcaaaaatgtcatattattggttttggctagactttatttctttattcttgtgctacagcttgaaaacatgtggccagtttttctagttggctacattctcacctttagatttaacagtttttatctttttgttatacagatttatttatttttttgtttctcagtgtgtgtgtgtgtgtgtgttgtgtatgttgtgtgtatgtgtgtgtacatgcacagtgtgtacacatgaggattcatgcttacatgtgttacagtgcacatatttaagtcagaataatgcccaggaataggttgcctgcttctatcttttggatcctagggattgaactcacaaaggcaaacctgacaataagtgcctttatccagggagccatccactggctcttggaacttctagctgtgagttcagttccttgtagcgcacacaaaaagttgcagttttatagaaatatttaatgtgatgccaatattagtagatgtaatctataatccaggcagggcaatctccttcagtgggaaaagaagcttgctgctgagttccatctccaggatacataagggctaaagggataactgactcctgacccctgcaggatggatgttctctgcccttcacaccacatcatgacatctgtgtccatgcacacacatagtgtaaaagaagaaatcaagtccatagttgtcctctgaccttcacacttgagctattttgaacacacacacacacacacacacgcacacacacacacacacacacacacacacacacataagcattattcattatgactaaaagtcaatcatcgaaagaaccacacaagccagtgaactttctaaacatacagatattagtttttttatagactctatttaaaaggaacttcactgacttataggatatggattgtcttcaagtcctgcattatcccaaagctttggccgccatgtttccatacatgttgactgtgcaaaatggttacctcatgtcaatttgaagaaactagggatattcctcatttcctacatcagggtttgtagctttgctggtagcctagtattatataggcagttggcaaactgttcagtatgcgccatgctgattggacagttgtcatattttaatgtcttccccagtgtatcttgtgtaatgcactcaaactctgaaccctacaaccactccagacattttgtgaaatggtacagagtattcctttgggaaatttgcctagctgtcagagtcttgtattttgaggtttttcaagatctaggtaaacaatttctaactataccttataaatattctcaatgagtcgtggtttatggcagttactatgctgcttctatgatatgaaacaatatagaaagtctaaaattaattttattgtatttatttattgtttttattagaatgtatgtgtgctcgcacatgttcacatgggctttttattttctgttcatctgtttgtccctctgtctgtccatgttccctgatgtgtgtttgagggtcagaggacaactttctgaagttgattattttagattatcttaatgatattttcagcttgttcagtaaacaatatattatgaaaattgttcttcaattttaggagactagggactttttctggcctttctagtcaccattaatacaccttgagatcacaggagacttccgactgctgtatatgcagatagtttatttaacctgcttttaacagaacagagaaaaaaaaatttttgctatagtgaatttcctatgtaatcaactcttacaaattaacctaatgcatagctcaaatctaagttgtgtgctcttctatgccctctgatgcagaaagcaatgtatgtgtatgtgtgtgttaggataatcattggttgaaaacataaaatagaggttgaaagcatcttatcaaatgaacatgttgaatgtaacatacagacatttctggatgtatgtttgtaatgtttgtaatactgtttgctgtctgggttcattggagtccagctgtagtcagcgacttaattcctttcaaagttctgttactaatgctgcaaattattccgttccttctctgtgtgataatttctgtgctgttcaatgaagacagcacaaatccctttggtagggacatacacagagacacggagacagattcagaaaagagccttcagataggaacagattcagactcatacaatagacaggcagggacaatggaagacacaggtaaagtaaaataaagtatcgaaatcgcagcttgctcttagttgaccagcaccagaaagggcttggatttctttccttaatgtgacaccaaagcaatattagtgattctgagtttatcattaagatattcaaaccaactgcattttggagctccatgtaaggaatctcaatgcgttaaatctatgtaactcagtataaatgttcttggactacttgtgaccaaatcatccttgaatctatttgcagttgaaaatgtgaacagcgtgaatataatagaaacaattcaaatcagaataattcaaaatattcagctactcaagagggaatgagttgggacaatctgttgccccatttgaaatgatttggagttttattgggttggtttgtaggaaatgccatgtttgtatttgcagaattaagcacgtgggaaggttaatggagcacgaaagtaaatacagagaagagataaaaggcaaggagttttgttttaggacagctggtgactgttcagaaccaggctgaagagccagtgagataaatgtttcagtctttaagatgcaagtagtagaatatctgtttaagcaagaataatgatgttaaaaagaattcctccattttctcaaagatgtgattaaagaaaatgctttttaaagatttatttttgtatgtgtgtgtttgtgtgtgtgtacacacgagggtatgtgtgcaggtgtattttatgtgggtgtacatgtgtacagaggacagaggtaaacatctattgtcattcctaaaatataaagtttactttgtttccttgagaaagaatcacttgctgtcctgtgactcaatgatttagccagatgagctggtgagcaagccccaacctgtctccctgtttccaaaacggagattgtacgagtatatctctacacatcgcttattatatattacatgaatactcaggatcaaatgcagatcttcagtgttcttgcttctagagaagtactttaccaactgaaccatctctcccaccttgtccattagttaagcatctgtcaattctgaggatatttgctagtttacattcataacagtgaccactcctatcactggcttcttaggctcattcaggcatcatcacagaaagttacccatcatcattataactctttcagtagattaatgattcccaaattttctaatgcggagaaccttaaatacacttccccatgttgtggtgatccccaatcataaaatgatttctgtgctacttcataactgtaattttggaactgttaggaattgtaatataagtatctgatatgcagaatatctgatatgtaaccccaagggtgtcatgccacaggttgagaaccactgcagtagatagcctctgaaaagtctgagtgaatactccactcgagggaaggttttgtcatttgtcatcatctttagtttatgtaagatattctaaaatgagtgatgtataaatagatcacttaatatagtaaaaaatgaataaaattctcatatgcataatagaaagagagatgctggagaataagcatgggttaaggctagggaggtagctcagtatcagtgttcagcaagcatgaggtcctgagttcagattcattgcacacatttaaaagtagaatacagtgtcttaaaactgtgacttgggagacaaagacaagaggatgactgaagcttatatccaccaacgtgaaaagaaagaagagaagagaagagaagagaagagaagagaagagaagagaagagaagagaagagaagagaagaggaaagaaaaaaagaaaagaaatcgccaatacaagatttagtgagaaaccatgtgtaaaaataatgagaagagaaataacagactgagacacatctgatgacctgctttggcctctgcatttacatgttgtaggcatgcaaatcaaccatgcatatatatgcatctcaaatacatgtacagcatacacaaacacacacacacacacacacacacacacacacacacacaaaacaagcataatttgaaaagagctatatggaaagtcactgcagttttccatcaaaatgaaagacaaagttactatttttagggcatttaccacgaaaaagggaacaactaaccacactgtgagttgatttctcttggtctcagctgttaacaccaagtgttacaatgatcactcagaaacagtgttgatgagatatttttaaagatttgtctctcactcgctttttatctttctctgtctctctgtctgtctctctcgtgtgtgtgtgtgtgtgtgtgtgtgtgtgtgagagagagagagagagagagagagagagagagagagagagagagatgagtatgtgcatatagtgcaagtaatcatttaatttagctactacactgtgtttgtttttaatgaatggtgggaaacctatttgaaataaacctgctttgttgaaaaaaaagtgtgcactgtttgatggtaaagtatatcatgtatcattttgttgtttccaatcttttcctcatacattttgaccagcagctgactgttcttcaaggattcagttcttcgtgttatcttccattgtagtgattagaaaggcaggatgacattgttgttccaaagcactttggcagagtcctttacctagagttaatgaattggagcttcatttacaccaagacagcatgtataaaatgatgtcaccttctctggtaaagaaaatagactgtactccttaaaatatatccatccatttataatccattcacctttgaataattaaagatgttgctgaagagaaaactgatcctaatcagctttcaaactgcgatcgtgcctgtgctgaatctttcttttaagaacgtatatctcctggagcatgttataattacaaaactccttctctgtctctgcaggaactaggaagtaacagccctccacaaagaaactggaagggaatcgccattgccctgctggtgatcttggtggtatgctcactcatcacaatgtctgtcatcctgttaacaccaggtaatccattgcggttcctctctttgagtggcattatggtagatatgttcatcatgccttacaaaggtcgttctttgtggtttctttgggcagactaatacaggctggattttttaaaagtactattagattatttgcctaatgacatggtgatatttgtggattcaatattttgtgggcatttagggtgaagctggatcctgaaacatgtaaaagaaggatgctaaggagattcgtggtctccataactatttaaagaaagatatgtgattcatttttgcactccacaatttatagtaattttattaggaatcatcccaaactagaaatgaatccatatatccttcaagtagctaatgcttgaacaaatatgtaataaaacagtattccacagagaaatgagtaaatgctcaatgtacacaaaattcttcaaaatgatagggatgcatgaagctaagtgcaagaaaccaaacccaaaattctattaattatacataagcatttatataaatgtcatttatatggccttctcaaaaagaaagggcacctgtagttcagaaatggggccttgcaactgtagttcagttagaagggtgctcaaccagcatgtatgagaccctggaacctacatccaggactatgtaaatagggagtgatggtgcagagccttaatccttgcagctgagtttagatgtgcaaaagtcagaagtatgcaattattcgtagctatataggctgttgccagcccaagatacataggaccccaaaggagcaaactcttatgagtaagagtcactttgaatctggtgacaaaattgtcctgagtgttgagtgagttggttctgtggtctttggaaatgcagtgactggagtaatagtcccttttggcttttgttgtggctggaaacacgagatcatgccatgtggaactgtatgtacttctgtgtatgctaacctaatatatggacaccgaggatctgagagggtagagatcatatcacaagagacagatcagaatgtagagatcttttccctttgtctcttcttccagtgttgttactggtatcttgacaccttagactgatgagaaagcagtaaaggagaggctccacagagcgtgttgtgtgaattatcgctgtccaggaaattgtattttatctctgatttcttcaataccctttctcttttcttccatcccctttggctctcttctttcctttcttagtctctctagagcataaataaaatttatttatttttagtattttacatgttcagaaatcagtgcttttacaaacatagaatatttcaatgagtattgccccaatgataatttttggacggggttatttacataatcttgtgtgggaattttcatgcacttagtttacccatgggcattactttaatccctaggagttacactatgctctagtaggggttaaaaagtgaggcagaagtaacaggcaccccaagccatcttccagaaaagcacaaagccagcacacttctgtagcccacctgggtatcttctgcaaagacaaggtgcccaggtgtgcttagtgttatgcaaatgcattcatttctggaataaatctaggtccttaagtacatagactgtcattagatgtcttctattttcctccttgttagtgaggcaagacctttccattgagtccatagtttaccttaacaaaattgtaacctgttgctaagcatgttgcatttaaacacatccgctcccccaccaccaacttcaccattatctaatccctgtaaagacagtgaacttatttcccattaaacaaatgtgattaacaggagctccatttcagagtcatttactcatgtaattatagtgactaattacacaaatgacagttatcaatcactccaatgggctacttggtgaaatattccatcttttaaaaatattgacttccaaaatatgtaaactagaaaaaataaatagttggtagtttttatttatcttctggagagactgagaaagaaggaaggtagccaatgagggagggaagaagagagaaaggtatctgaagaaataagagagaaaacccgatttcctggaaagagctggctcacccagcttgctccggggagcctccccctcacagcctcattcgtgcatctgtggtttggagtaattgagcaatgtgatggcattaataagtgactgcagcatgccaagaagctccgctccaggaagatgagcttctgttcagatggtgtttcgcttaaacataagaatttgagcataattacaaaaaatgaaccatttgcttttgctgtcttgaatgcatgcctatcccccagatgcagaaaaagaaggcctggttccagaatttctgtgcttcttttgaattcacccattcaatgtgattctactacctctccctctgtggctcactcaggattttttctaacttagtgattttaatacatatatgcattaaaatgggaatcattagaatggcttgcacagtatggttcaggaagtcaaaatggctgtatgacgttggaaaggttcaattgggtagttgcccagttccaatctggtgttgaaggcctggattatttctggataactgttagttttcaatctatattggaagccccaaaaagctggttctaatataagtaaaagaaggttgcagaaataggatgggtgagcttacaggatggggagaaggtaagttttgggctcaactgaaagttcctactcacagataagatgacaaatggaagaagatatctgatgttagtctatggcatccactcatttatgtgtacatgtgtggttacatacatggaaacatgaatgtgtatgtatgtatccacaatacaacatacacaggaaaatcatttggtaggtaaatgtgaagattaaaccatagtatagatattctggtattggctggcactcctactcttttaaaatttaaatatataacctcttcctgttacacaaacacataagtctagatattctcccatccccagtccaaatactgaattgcatatgacattaaccatacaactgaaatcaacagttatggttttaatttataatttttcaagtgtgtttcacttggaaagggagagatgacagaaggagataacaaaacaagatggcataatggtggagtggaagaaacagaaagggagagagagataaagacacagagacagagatttacacagagaaacagagatacagaggcagacagatacagacacagagagatgacagtgataacagaggtgtgtgtgtgtgtgtgtgtgtgtgtgtgtgtgtgtgagagagagagagagagagagagagagttgtcaaggaaagagtctgttgacagagacagaagcagacatagtgttttctgggctatgaaatgatcctttgcctttgtacctatcataaaaaatgactgtcacatgacatagtaagaataacagcagctatagtaatggtgaccagtctactgacatacaaatcccgtttacacacactctctttgtgttgttttcaccgagaaaacagtaacatttagattttgatgagtgaaagcacacaagagactatctagtctgagaaatgattcagaagctgctcttctcaaaatagccccgaagcccgtgggtgggtaagtgctgaggaatgcaagcctatatctagaagaacacatgttcattgtaattttggcttgattgcatattttattacagaggtaatttcagacaggtgcctgagttgccagcttgtaggaattcctgtgccttgtgaagagaaggcttaattgttttcaaagactgagttaaccaatcaagtatcccctttaataagtaacatttctgaaaagaaaaatcctgtctccatatttaattgaaaagttaaatacataggtatattaaccaaacatacatatgctttagcttgtactagttttaagaaataagtactgggtttgcatgcctttgatctcagcatttggagggcagagaaaggcaggtctctatgagtgtgaggccagctgaggagttgcagtgagaggaaatttcaagatagctaagactgtcctacatagacagattctgtcttaaaataaatgaacaaacaaaaacccaaatgtagaacaaaggaggaggagcaagaagagagggaagagagaaatagagannnnnnnnnnnnnnnnnnnnnnnnngaagaaaggaagaaggaagaaggaggagaaaggtgtttgggaagaccttgatactggtacttgggaatcattgaaagcaatgactataaagtcaacaatgtttgtattctacaaacatgatacaaaggctttcatgtttgaatgcatagtaactattacaaataccttcatgcttaaaagtattgcaatcagtctaatatgaataaattttatttttagtcccagatttccaccaagtgtatagcagagactggaaagaaaggtcatttgttaaagtgctttccttgtaagcaagaagatttgagttcgatggccagaatctggctgcagtgccttgtgtcttttatagaaaccctggaaaggtggagagaggaggatccctggggttctagggtcattctgtttgacttcattgttgaacttcaggtcaatgaaagaccctgtccacaaaggacaagggcatggaagtttttcctcaaaagaacattggagattgtcctctggcaactacataaatgtgcaaatgtatacaactcgcttcatataaaactaattgtgtgtatgcacactcacaatgtttttaaatataggatgactattactatgttctaaaaaacattttaaaagaatgtggtaaccaattctggcatgcttgtaaaacaggggtgcttagtttttttctatttatcttttcttttcttcttttcttttctttgtgtgtgtgtgtgtcacagtgttttgtagaaactcttatttagaaatcttatgaaagaattaagttttaatagtacggtttaaatctcctcagtgttagatatttctctccctccccttctctcatactctcccatccttctcctcacataagcctcctttcccatggtgctctgtttaaggcttacactacaagaggaaacacatgcctggtactgtaaacctgtctaaaaacccatagttggaaacatcacaggccctgggagtgaacctaccagtactatttgacaaaatgaaaatggtatcaactgcccactaagtctctctatatacaccaatagaaatagtgcagctctaaggtttcatcagaaaagttgctttgagattaatgcagcacctcacaattgatcataatacgaagaataaatgccagtggccaggctagtcacacaggatgagatttctatatcatatatatcatatatccctaagagctcttgtagagaaagggatggcctaattataaaggacagaagttgagaaggtccaggaaaacaaacaaacaaacaaacaaacaaaacaatgccttctaggcaagccaggactgtgtacacctgaattcagagggggtttacttgttcccataccacctgcacaagatcaaggcagtcaacattccagcaagaatcaaggaggggctcctgatggctcctcctaattgaggagctattaacagttgatggcctctgtgggaggaaagccagttttatttatgggtgtggaccctggtagttaaactgtgctcaagtggatggtcctagacccccaagtttataaacagcacaaactggactcctgggttatgaaataaaactaaaaagaggacatgaagttaggagcccggaggagtgagtttgatctagaactatgtgtgtgtgtgtgtgtgtgtgtgtgtgtgtgtgtgtgtgtgtacttgtaaaataattagcaggccataggatcctggagaaaataaatgcaagcgaatgtaaacaaattggcctaagtatcagaatgacagttaaatgtgctccaggatagtagtgatatatatttatgatgatatatcttgaccccttaaaaaactgaatttgtgccagacctcacagcaaatgacatctaaagtttttgtttgtttgtttttggttttgtttctgttctacagtgtgttcagcctgtgtaactttaacttgcctttaagagaccgatatcaccaacctttcttgctttggatttcccatggaatcagcttttacaatctaacctaagtgaatagctttacttttattatgttcttttcaatgcttcttagccaactgtgtgtgtgttgtgtgtgttgtgtttgtgtgtgttgtgataattatttgcttaaataggccaacacagtagatgaaacctcaaaatatatattcgccaaaaatgttgccagcctcatagatgtaggttgatagcatatctatacaattctgagtcagctggttgacgtttttccttgtaaaactgctaaagaattctatagagaattcatcattcttgtcctgtgccatgttttctgtgctgttcaataaatgttgagcaaagttctttgttaaggagagataatagggacaggtcaggtccatgctacagacagaccacagacaggccagtaaccacaaactgctaaaaaatggagatatgatgacagaaatgcagaattcagtgcagactaattttttttggtcaatgaaattgaagaggacatcattatttcattccctaatgtgacattgatgcattgttgtgttctctggcattacatttatgtataatctaacacctaacctagctgtttgtaatactgacacaaagatggtttcctagtcctatttactgggacaacaatcagaaaaaaagcaagcaaaaacttgtataaaactgggtccctcaacagttcattatgacttgaggaggggcccacaaggccctacactcctttagggattactggcaattaatgaatgttgaaggagagggactacatcctttagtgatgttaaccaaggctaagttaccctcactctagtaaataatcctctactcaggcttaacccaggaacaaattaaattcagtgatcactcgcaaacattgggtatgaaagtagatcttacaggagtgagagaagggtgaaataggggaagagtcattaaaaatgagtaatagtcattatagaattatatgacacctaataaaaattatttaattaaagtaaaacagttctttaaaataaagacattcaaatattaaaaatatatttgtcttctcttttggaaagaagagaaagacatcaatatgtacatagtctttaatgacataaagaatgtgattgtacttgtagcagatgatatgctattattatgcatattgtgtagaaatccaaagtgggttgatcatagcgactattgtttgctagcacaacaatagagcctgcttagagttatttagaacgtcatgttagattataccacaaacaatttctcggcagctataatttaacaggtgtcattaaagcatgtgacctgtgtcttaagatgtcaaagcagcaattaagctctctcattaagcttttaggaaaggaaaattatcttttacagattttgagattggcatgacccacacataaacatcaacatcaaacaagatgcaatttgtttgttttgttttgttgcattagaaaaggagattatgttatgtcataggaatcatagaatgtctttgctcatttactttttaagaaacatcacagatgaacacacaagaatgccatattgcttagcaccattagcctgccaaagagaaaatgacagcctaacagtttccttccatgaaactaattgttaactttaaagcatatttatattttttatgtgcctgtcttatgtgactctgtatgcatttgcccacagaggttagtagaggacatcagatgtcctggatgtggagttacagtggttcagcgccacccaatgtgggtgccaagatccaaactgggcgtctctgcaagagcaataagagctctaaatggctgagccatttctcccggtcccatgctgcttgttagatagacatatttctgatgcataatgaacataactagagtaacaataggtacaattttgtatttattctattattatatttcatttctttataatttacttacattgctcaaaaagtaacataatgaaatttattttgtatgaaaatgtgtttaactttgcaaaagtcaagagaaattctcttgtaacacataacatttattgcaacttgccacatacctgatgctgtactaagtgcttgacatgtactgctctacttagccattcactgctaacatgaagtacactatttattcatatcgagtactttcttgggtgttataaattacgatagctaatattctaccaaaggatttcattttgtccctttatttattattattgtgtgtgtgtgtgcagtgtacaactgggtacatgtattatggacatggaaaggtcaaccttctagagtcagttctctcccattatctttacacgattttgtggggatcatacttagtttgttaggtttatgtagaaattacacaacagacggatccatctcaccaacccctgacagggtggagaatcacagcggatatgcatctaggtacatctttgggagagtacttacatcaaattaactgagatacaaaaacttactcataatataggcaatagccttctgtgcctttggggcaatactacacataaagaaagaaactgagctgagcccgagcattcatcttctgctttcccactctagaatgtgagcagcctcccagtgctcttttaaccatgttttcccaacatgaggtgaatccaaataaattatctctttcttaagttactttcgctaagcaatcttgtcacagaaacaatgaatagtaaccaatatacatgctagcttaatagttcagtttcacataaggcaaatactgaaaagttgaagcaacatcccaggcttttggggtagaccatatgtctcaagacacaaaaaacaggttgtgattcatcctgtcactggaaagaagataggagccaacatattgcacagagtaaacaaattgtgctttattctgacccctcttttttaatgagtaaaatttttatattaaaggaaacgtagagaaatccacttgaacacagtggaaaaaaacagaatttagaagttgaacaccataacttaaatttttattttacctgtcataattttactgaaagataaatgcccctgataaaacataagcacatatttcctctgataaactgtataatataaaattgtatatcactatgactttacatagttttccatacttttagtcttttcttatgaatgtgattgctcaaagtagtgttttacctgagaagtctcccaataaagggggtgatcacattcagctatttcctccacttaaaaaggtttttaatatatttttcttgtaatgtttatggaatgagataatttaacaaacaattgttctgcttcatagaaatagaagtgagaattgaattcattcactttgaactgtataacatcagtcaatagcagaattattccattagtttaaaactaactgtattgggttagatatatgatagagaatagacagatgataagtaatagataatagatagatatatgatatgcatatatgatagtagataaaagatgacaaagatagacatataaatacatgaattgtagattgtaaatatattgagtgatacatagattatataatgaggataacagtaataaatgataattgactgattgacaataattatagacaatatatcaatgaagtgacaaatctattcccttacattaagaggtcatcttctaattatggtctcctttatgccttcatgttgtcctgcacacacaaacacacacacaccaattctatttgtgcatatgaaacaaaacatggctgttttatgctctgaatctggcttctttcatttagcataatttcccattccatgtattttgctgcaaatattataactttattctgcttacatatatccaattgccatataaaattctattgcacgtataaaattccatattttctttttatgcccatccatggatggatttataggctcgttccatttctttgcaattatggatagtatagtgatgataaaaatggatgtgggtttctttgtcacatgttgatgtagagtgttccaggtatattcccagggatggtatagctgcaatgtataaatataagggtttttttttctttctatttttggtgttttaaggaacctcacagggatttccatagtggcttcaccaagtttacatccttaccaacagtttgaagagaagttaaaaagtggaaataagggtcaggggtagactgtggaatagaagattaaatacgaataaagtataactacatgtattcatgaaaatgccataaagaacccatttatcaaatgtgctaatatcttaaagttaaaattaaagagtagtatttttaaaagtatttcctaaattttatctttgctctggaaagtgacaatttaactccaatgattctgattattttattgtctggcatgtacatttgcattattttaatttttctaaagtattcagatgggtgtgaacccatgcccctttcaagaaatttctagagaatttgaatctgtgagaatagacttggggacatccttctttaaatgaaaaccaatgcactcaaatctatgaataacaaatctgtttctctttcccagacactgaggtagtatctatagcgacagcttcccctcttttttcctggagaggaacagttcagcagttgagaatcttaatggtttggattattttatctcttccaaattcaatcttcatcttttgttctatgactcatattctgatggctgctggtggttgtggtgatgacatttgtgtgtgtgtgtgtgtgtgtgtgtatgcaagtgtgcatgtgtgtctaaagttaagctacataatcatacaacatgaaaattgcaagcacgcttgtatgtaaacttcagatacatacatatatatgtatgtatatgtatatatatatgtatatgtgtgtatatatactatgtgaacatatatgtgtgggagtgaacatgtacagaatcagagaatgacatctttgctttacttcatcattctctaccttattcaattgatacaggatttctagctcaaacttagagcttgccaatatggcttttgcttttgtccagcttctactggggaacatcctctctcagccttcaacgtgggaagagaaagattcaggatgctcacctggcatttacaggggttctaaatatctgaattcagttgtcttaactgcatggtaaacactttaatcactaagcaatgctgcagcctctctgcctgtctttactcttgttaatttctcaaatttgccagtgtaacacattttctgtttacttacagttgtaccacactgctttacacattcatattgattttattgttccctttgttattgctattatttaattattgattttttaatgtagagatgaggaccaaaacctgagttgcctctgattactgtacctgcaccatgatatagtagtatcagcactcccattcacacatacctatacatccatcatctatagaggcagcacacacaatagtataaaaagacaatcatggggagatggcttcctgggcatagtgcttttggtacatgcatcagaacctgtcgtcacgtccctagaacatacataaaagctagatttggaacaatcagttataaccccggtgcaataatgtagagacaggtagattctgtgaacttatttgccacccaatttagtcacaatggtgatcatcagggtgaatgagaaactctgtcccaaagattaaagtgaagagcaattaaagaagacatctcattcttgtctctggtctctaaatgtgcacatatagttgggtctacgcatatacatgtgtacatacaagcaggcacacacaaaataataatagtcagtcatgcccaatctaacaaaaaagcaaagaagaaaacacagtgcctgtatcatgctcacacttgtaagtacattctagaaggaaagagcatgcattcaaatatatcctcatttagaaaatcagtttcatgttgctgtgtaatgttacatagaacaacaaagtcaaaaggcttacacatataatattgatattgaaattgctaacctcatttcccttcttcttttttaataagaaagctattcttacaggtaggaaaatgttaagtagaaatagtatcagaaaagcaaaggtaatattattaaagtgaattcctaatatatcccaggttgtaattacaattatacaagttccacaggtaacacaaagcagtatagtcatgtttagtagattaacagacttttttttcctttttagctttttctaaagtgcaaatgagtgatttagaatttaacatgccccattccaagtagcctgatgtttctttttatacacagatcttgtctacaggttaatatttgtgtggttcataacttgaacctttcaaactgacaaagcccttcaaaaacagacacctggatgaattttccatcttactgcatttcttcgctaagtattaagaacgtttaagacactgttttaggtgatgtgattatatatttttatgaaaatatttcttacactgtaaaaggctggtagctttcctggctccacagttgagttaacaataccctgtgaggtcactgaagacttggtctggtttcctaccctgtattcaacctgtttgtttgacctacatttagaaaaactgtggaacaacaaaccttactagccttggatttctcatgtagtcaacttgtacaagtctatgctatcgaacaaatttaatcttatgtatttttctgtgcctctggctcagagcaatatgcacatatgagtgtgtgctatggtaatcatttgttaaaaatagacaatgggttgaaagaagtttcatgcaaaaaatatctgctataagtgttgaaatcaacatggggctataatttaataatggtatatttgcagtactgtttgctctcctgttcagttgagatcagttggagtcagtaacttaatccctttaaattctactgaatatttctatgcagtgcctcattccttccacatgtgatactttatgtactgttcaataaatacagagcaatacaatgtgctagagagacacaggcgataggaacagatccaaaatacacatgacacagaatacaagtaagctaaaaaccacaaactacagactgcaagcaccaggagaaaaatggagaatccatgtttaggctccttcttggtctcattagcccaagggaaattgttgagctttctttttgtaatgtgaactatattggtgcctttgaggatgtctttaacatatttgcccaatggaatgttgtagtaaatctgaggcaacaaaaaggtatgttttggatacaaaatatatgaaacaaatatgtctccagttaaaacaatacatataactccatgtatttttggtatagaaaacttaaaagtccttcatactgctacacctttttttttttatcataataatggctgacacttactaggctgagttctctgctgaataatgtcaggctatcaaactactagtggctagtacagtcatataccctaggcaagaagccatggctagcacttttctaaaccagtataatttcaaactgtgtttgaaatacccagccttatagtcatagagaagtatagctcatattctttttaaaaaaacaaatccataactgatcaaaaatgcaaagaaagctgatttgggaataaagtccccaactgatatattagcaatacaacttcttcatctaaggcttacaaacactatggaagaaaaatatcattttcccaaaaacttcaagttggcagtcaagaacatgggcaaaatcctgtgatatttgggagtctatagtaccccagttgccaacaaatccaataacaataacacgtttctggctgtggacttttttgtttgttagcttgtggtgtctagttgcagcattaatgtcctgttatctgttagctgtgccttatgtgtgtatttaaatattttcagaaaatagatttcttttgactttaagaaatgtagtattagtcattattcatcatgtccctcctctactctgccctcacaccacacataactcttcttgttccactgtgtctccattccatgacattgtactctatctctcttcccttgaaagcccatccatcactgtcagtaactaatttcctgatctctatgggatttccaaacatagcccacatatgtaagaattgaaagttaacatccacaaaagagagaccacatggtaccatctatctttctgggccaggtgaacaactccctccatttacctgtgaattccatgatttaatgttttggatgagttagcaataacccaatgagtaaatccacccttctttcattatccattcattagctcatggacatctaaactgcatctatattttggtcatggtaaatagaaaagaagtgaccatggatggagtaggatgtagagtctgctaagtatgttcccagaagtagtgttctagaatcttatggtaggtcattttttagcattttgaggaaactccaaactaatttccataatggtgctaccatttatacttctaccagcaatgaagagtgttcctttcccccatatctgtagtagcatttgttgtcattgtgtggttggttcttagtttgtttatattgttttgtcttggctcagttttgttttggttttgatttcttttgtatttgctgctgttgttttatcttagtcattctgattggggtgagttcaaactacagagtattttaattttcattttcctgattgctaagcgtatggaacatgcaataaactggtttttgtgtatttcatcttttgaaagtaatctgttaaatcccaagttcattcttaaaatgtgctgtgtagttgcttctttatgtgcattttgctcatgtgtggggtgggctaaggttgaaaacaatgttgtgaggtgagtttgctccttctaacttgacatgaatttcaaaaatggaaatgagatcactgaatttgtacagcactggatgttatctgctgagctcccttggtggtcctgttcattttttaataaattaggttaacagtgagacaatttgcagggatagcaagatagcccataaaagcacccaaggacacatgccccactatgttcataacagccttatttataatagccagaacctggaaacaaactagatgtccctcaacagaagaatggatacagaaaattttgtatatttacactacagagctattaaaaataatgatttcatgaaatttacaggcaaatggatggaacttgaaaatatcattctgagtgaggtgacccagtcacaaaagaatacaaatggtatgtactcactgataaatggatattagccaaaaagaagctccaaataaccacgatacaactcacagaccatataaaatccaagaggaaagaagatcacaccaaagtgtggatgctacagtcctactcagtagggagaagagaataatccctgaaaaatcaagccagataaggacctgggagggagataggagggagaggggaaaacaggggcagtgcagatatgggaggagatagagaagtacagagggtcagaaatttgaaaataggtgtgtagctgtggggaaggaggaactgggggtagccattcgaaagtcccatatgccagggacccaggaggttcccagaacccaacagagaggactttagccaaaatacccaataaaggggagatagaatctgtagagaccatatccagtgaatatgtataacctccatttgagtggtgaggccacccaaccacctcaaaaatattaacctagaattcctcctgtcgaaagaaaatgcagggacaaagagtagagctgaaactgaaggaaaggctatttagagactgccccacctagggatccattccatatgctgacaccaaacccagacactactgctgatgttaaatagtgcttaaggacaggagtccagtatagctgtcctctgagactctgctggaagagcctgaccaatacagatgcaaatgttcacagccaagcattggactgagcccagagacctcaatggagaagttagagcaaggagatgaaggggtttacagccttataggaagaacaataataccaaccaagcagaacaacccctccccactctgccaagctctcaagactaaaccaccaaccaaaggtacacagaggaaacccatggctccagctgggtatgtagcagaggcttgccttatctggcaccactgggaggtgagcccctttgcccttctgaggcttgatgatccaggagagaataacactagggcactgaagcagaagtgggtgggcaggtgggggagcaccctcatagaggaagagaggagagaggagggaatatgggcatatggaggggaaactgggaataacatttgaaatggaaacaaataaaataaccaagaaaaacaaatacaaaaagcacctgttgccaaatttaattgactgagttccagtcccaggactgactgatgaaggtaaaaagaagaaattaggcctgacattgtcctttgtcctccaaccatgcactatagcatgcaaaacatacccatgcatgtatgtatttatacacatgaaaaaatgtaataaaatctaagaaaactatttataattccaatttttttccatttttgtaaattttggcagcagttattctgcaatgtagtgttttattctatattgagagactatagtgcagtaaaaacaatggaaattggtactttagctgtcaaacacaatatcagttatgtttgattggccagttagaagacataaaaacacccagtacttttaaaactttggaaatttggaacttaaactttacttctatgatttgttgtctgccttttcagccagttccctgaagagagtagaagcagggggctttctttcatgtcatgtgagaatatataaggcttagcttcgtaggtgaaggtgcttttcactagggaagtccctgaactgacaaggtcaaaggagagagctgacttcatcgagatgtcctccttggcacccttccagtaataataaattgaaaatttaaggacaaaaagttctttaaaggaagcacattataggagtgtcctgtatcaacattaaccatggttaatgaaggcagaaggtaaccatgggaatgaaggcagaaggtaaccatgggtaatgaaggcagaaggtaaccatgggaatgaaggcaatcataaagaaaacacaatgtttaaagtacagcagaagtcaatggagtctcagtgaactggggggcagatggaggaataatccccagcatagtaagtagactgactttcttctcctggttgggggttgggaggagtaaggggaggatactggatcacttgattagatttttccttttattcctgttttaacaggaaattatttcaaatgggttttttaaattaaaagaaatatttctgaacctctgatatcaagaggaagccagataaaaagtaacacaattatttcctgtgaagagaactgtagaactcaatgtcatcaattagttttttgtctgttcaatactgaaggatgtaacttttctcttctaagattattcagaaactcatttccaaaggccatttaagaataagattggattttgggggaggaagaacaggaatgccaataatagtctatgatcttaaatgacagactaaaccccagaaagaacatggagggaatttttcaattttgttccattactgaaatcccattgcaaaagaggtacaatttagctgcttttataccctgtagctatttgaaagtttttaatcattttcatagttttgttaatactcctgttactattaattcttcttcttcttcttcttcttcttcttcttcttcttcttcttcttcttcttcttcttcttcttcttcttcttcttcttcttcttcttcttcttcttcttttcttttttctggccttttttgatattcataaccacaacatagacttgcaagtttagagagtgtttatcacataatggcaatgattacctcgtgataggcttttatattaacaagcatgtataaacagcaaataagtgagctactttgctggtttagaactgcctcagtcctaaaagcatttcctgcctggatggaaaaccttctgtggtggtttgaatagccatggcccccataaacccatgtgcttaaatgcttggcccttagagattagcactattaggagaagtggtcttgttggaggaagtatgtcacagtagggttgggctttgaggtctcttatgctcaagttatgaccagggtggctcagtgtctttttctgctgcctatggattaagatgtagaactctcagctccttctctgccaacatatctgtctgcatgctgccatgcttcctcaaatgatgatgataatggaccaatcctgtgaaactctaagccagtcccactcaaatattttactttataagagttgctgtggtcatggggtttcttcacagccaaaaacaccaactaaggtactttctgtttggagtataatgttatacaagtgtcaaaaagggaaggacatgaggagagaggaaaagcagatggaagaatagaggagtagaggaatataggggtaggaaagggggaagagagaggagagagaggctcagatagtggcagaaatggagagaattcaggctggggacagaatatagtcccaaggggagcccctgaagatctactctcctcacctcttccctgcttcctaagttttcatcaccctggttgctcacatatcagtagtattagatgagtgcactggggagtttgaattctcatcatccagtcactgggtcaaaatacttgggaaaatcaaattcaaaataaggagagatttatttttatcacagatttagaagcttataaatgcagatccatggttctattccggagtattgcaagggaggacatagagagtgtggcctgaaaggggatgcctaaagttgctgctcaccttatggctgtggtccgtggctttttcttgggaggcatgtacaagcgctcagggactgtccatatggagctaaaggcagatcaatgtggaaaccttgtaagtttaatagggttgtgtaagaatgaaaggtttcttataggaacatgggtggctaggcagtggtatctatgaaagccactctagcatgtgtgatgactcacaaatgctgcatccctggaactccatgagcatgttacaggcagcttcattgactagagcatcttcttcccagaagtcctcactgcttatttaaccttcaggaggacagaagcttgtaagtcttttagctttcagggagctcctggtttacttgagttatttaccttccaagttttaaagattcactccaggatatgacaacttcaatttggttctttctgaatctcagtgaaccctgctccaggatggaaagttttcaagctgaaggatattgctatagaacaattgaacagagggaaaggcaaaataaaatgtgtcggaatgaagaaggaggagggagaataggaaagaaatgctgtgcaaggtggttagaataaagaagaggggagatgggagaataaaggaaggggacagagtctagaaaatgagggaaggatgaaatgttaaggcatgggaaatagtgggaaagaggagaaaggagggtaggagggtatgagggaatgtgggttagtatatacttccatagggagtcactaaagacctacacacttcaactaggccttacctctaagtttccatcacccctgatggaccatgtgtcatactacaaaactagcactagatgaatccatgggtaaagcaggaatactcatgacccaatgatttctccgaagtccctcttctgaatcctgctttttggaatttcactcttccagtacatgaacatttagggcatatttttaatctagccataccatacaccttatatttaaatactacataattcaagagaattacattcaaaaaaacttcctaagataagcacaagtataagcattcaattttagagaagatttttttctgacattaagggtaattaaacctcccttcaccgaagttattaaggaagaaactgtgtgccacagtgatatacaatctaatttcagtttgcttgtgagccaccttgcagtgttcacttggaatgactgagttacctgactggtatccaagattctctggtgtacattaggtttggggttaaattactggggcaattattaaaatatacaaaatactatgtatctctccttatgtctgactgtggcataagttcatgaggacttaggtttcaatatgggtttataaatgcttcctgattcctttttgaaaagatttcatttttggatttgcatgcaaagatatgtgagtgtgtgtgannnnnnnnnnnnnnnnnnnnnnnnnnnnnnnnnnnnnnnnnnnnnnatatatatatatatatatatatatatatatatatatatagttagaaacaaagaaaaaatttgattttatacaaaagaacatatggagaaatgatagtaaaataggaagtaatttctttatgttagaagatatgcaaaagtccagtaatacaaacaaacaaacaaacaaacaagcaagcaaacagactaaacagtattcaacaaaatctctacaaaaataccattgagtttgtattttgctggccaactactgctgggtatgggtttactctgaggtaggacttgtttgcccaataagactctactggagaaaagtagttgtttctttgcaagatgccaattgacaatagcttcttcattaggaatggaaacccatgtctactttcccaactcatcactgaaaggctctctgtcttgaacctgtgctggcctagttcatgctgtcaaaatctctgtgagttacatatgtatctatactcctgtgtcatccatttaaatgacaccctctggaaaataaaatctttctgccctttctactccattgattcctaagattggggtgcggggggggcgggggggagagctagggggtagtggaggcattgatgaacataacctatttagaactgagtgctccaaaattcttccctctctgcacattgtctaattgtgaagatcttttctaatgatggttgaactaggcactgacctagggggttagcaaaatttcgttttgagtcatgttctccttatattcctggagccaaaaaatagtattaactcaaaattattattattttatcttggtatatattctttgtacttggtgttgagaattatgtaaatacataatgtactttgaaaacatctccttcatgacacatagcttcctatttctattccttccttctcacgttcatttcctttgttccagtgaacttctccatttcaggttcatgctccccggatcttaaatgtctatataaaattcagcctttatgtataagagaaggctggtgaccttgactttctgagaatggcccaaagtagtttttcttttaaatataataatctatgaagaacactggttgtaaaatgttggatatgtagagttagtaagaaggtactcagtccacaagccccaggtctagacactcttctatatcctaactggtataggtgtagttactaattttacagaactaaacacacatggaaatgaatacaaatgacatagtgaaatcaacaagaggcatagaacttataatatcaattacattctgttctctcattcagcgaaatggtattttccactgagggaagctgactgaaaagtgtgtaggacaagtgtgtattacttttctgctagaattgcataaaacatacattaaataacatagttaaaactttaataaaggtagaatttgaaaaactattcaaatataaagtcactgaaagtgcaaaaaccaaaagattcaattatcattaatttttattaatattatctttttaaaaatttatttatttttcacactcgatattccattcctgccccccatccaccctctgactgcttcacatcccacaccccctatgtccacatggtgcccccactctccatactaggtgacctctaaacttcctgtggcctcaagtctcttaagggttaggtacatcacttctgaatgaacacagacccagaagttctctaatctatgtgtgtttggggcttcatatcagctggtgtatgatgtctgtttggtggtccagtatttgagagatctcaggggttcagattaattgacaatgctggtccacctacagggtcacctttctcctcagcttcttccagtttttttcctaattcaacaacaggggtcaaaaacttctgtccatttgttgggtgcaaatatctgcatcgagctctttcagctgcttgttgggtctttgctagggcagttatgataggtcactttttgtgagcactcatagcatcagtaatagtgtcaggccttgggacatccccttgagctggatccgactttgagcctattgctggactttctttcctcaggcttctctccatttccatccctgtaattctttcacacaggaacaattatgggtcagagatgtaactgtgagatggcaaacctaaatctcacttgatgccctgtcttcctgctgaaggtaagctctctaagctccctccacctactgttgggcatctcatataagttctctcccttttattcctgagaatctctcaattcccaggactctgatgcattctagagggtcccccacaacctcctatctcctgaagttgtctgtttccattctttctgctggccctcagggtcagtccctttccctcttccaataccagattatattcccctctcaccccaactaacctccctatccactttccttccctgttcctccctccctccccaatttgattgctttcttctctctcccaagttggactgaggtgtcctcatttgggtagttcagcttgtagacattataattggtcacaaaacaggcatcaacagatacaaaatattgaaattatcccatgcatcctatcagatcaccatggactaaggcttatcttcaataacaacataaataatagaaagctaacattcacgtggaagctgaacaacactctactgaatgataacttggtcaaggaagaaataaagaaacaattaaagaatttttacagtttaatgaaaatgaagccacaacatacccaaacttatgggacacaaagaaagcagtcctatgaggaaaactcatagctctgagtacctccaaaaagaaactagagtgagaatacagtagcagcctgacagcacacctaaaagttctaaaacaaaaggaagcaaatatacccaagaggagtagaaggcaggaaataatcaaactcagggctgaaatcaaccaagtggaaacaaaaaagaactactcaaagaatcaaccaaaccaggagctggttctttgagaaaatcaacaagataggaaaacccttagccagactaactagagggcacagggacagtaacctcattaacaaaatcagaaatgcgaagggagatataacaacagaatgtgaagaaatcaaagaaatcatgagatcctactataaaagcctatactcaacaaaactggaaaacttggatgaaatggacaaattccatttatcaattcttgatcatggagagagagccattggcatttccagagtggttgtatcagtttgcaatcccgccagaaatggaggagtgttcctctttctccatatcctctccaacatgtgctgtcaactgaggttttgatctttgccattctgattggtgtaaggtggaatctcagggtcattttgatttgcatttctctgatcactaaggaatttgaacattgctttaggtgcttctcagccatttgagattcttcagtcatgaattcttgatttagttctatatgccattatttgatttggttgcttggttttttggtgattaacttctcaagttctttatatattttaaatattagccctctatcagatgtgggattagtgaagatatttttttcccaatctataggttgccaattttccttattgactatgtcaattgccttactaaagcttttcagtttcatgaggtctcatttatcaattcttgatcttagagcatgagccattggggtttaggaaatttcctactgtgccaatgagttcaaggttctttcccaattcctcttttattagattaagtgtatctagttttatgttgaggccctttatccacttggacttgagctttgtacaaagtgacaaatatggattttttttttttttttagtgtttgtaattaaaactttattgaaaatatttaaataagcttgatataaccaaatccactttatagtgctacattttttcttttttttccattttttattaggtatttagctcatttacatttccaatgctataccaaaagtcccccatacccccctcccctcccctacccacccactcccctttttggccctggcgttcccctgtactggagcatataaagtttgcaagtccaatgggcctctctttgcagtgatggccgactaggccatcttttgatacatatgcagctagagacaagagctcccaggtactgcttagttcatattgttgttccacccatagggttgcagttccctttagttccttgggtgctttctctagttcctccattgggggccctgtggtccattcaatagctgactgtgagcattcacttctgtgtttgctaggccctggcatagtctcacaagagacagctatatttgggtcctttcagcaaaatcttgctagtgtatgcaatggtgtcagcgtttggaagctgatcatgggatggatctctggatatggtaatcactagatggtccatcctttcgtcacacttccaaattttgtctctgtaactccttccatgggtgttttgtttcctattctaaataggggcaaagtgtccacacttcagtcttcgttcttcttgagtttaatgtgtttagcaaattatatcttatatcttgggtatcctaagtttggggctaatatccacttatagtgagtacatattgtgtgagtttctttgtgaatgtgttacctcactcaggatgatgccctccaggtccatccatttggctaggaatttcataaattcattctttttaatagctgagtagtactccattgtgtagatgtaccacattttctgtatccattcctctgttgaggggcatctgggttctttccagcttctggctattataaataaggctgctatgaacatagtggagcatgtgtccttcttaccagttggggcatcttctggatatatgcccaggagaggtattgctggatcctccggtagtactatgtccagttttctgaggaaccgccagactgatttccagagtggttgtacaagcctgcactcccaccaacaatggaggagtgttcctctttctgggcatccacgccagcatctgctgtcacctgaatttttcatcttagccattctgactggtgtgaggtagaatctcagggttgttttgatttgcatttccctgatgattaaggatgttgaacattttttcaggtgcttctctgccattccatattcctcaggtgagaattctttgttcaactctgagccccatttttgaatggggatattttattttctggagtccaccttcttgatttctttatatatattgcatattagtcccctatctgatttaggataggtaaagatcttttcccaatctgttggtggtctttttgtcttattgatggtgtcttttgccttgcagaagctttgcagtttcatgaggtcccgtttgtcaatcctcgatcttatagcacaagccattattgttctgttcaggaatttttcccctgtgcccatatcttcgaggcttttccgcactttctcctctataagtttcagtgtctctggttttatgtgaagttccttgatccacttagatttgaccttagtacaaggagataggaatggatcaattcccattcttctacatgataacaaccagttgtgccagcaccatttgttgaaaatgctgtctttcttccactggatggttttagctcccttgtcaaagatcaagtgaccataggtatgtgggttcatttctgggtcttcaattctactccattggtctacttgtctgtcactataccagtaccatgcagtttttatcacaattgctctgtagtaaagctttaggtcaggcatggtgattccaccagaggttcttttatccttgagaagagtttatgctatcctacgttttttgttattccagatgaatttgcagattgacttttctaattcgttgaagaattgaattggaattttgatggggattgcattgaatctgtagattgcttctggcaagatagccatttttacaatgttgatcctgcaaatccatgagcatgggagatccttccatcttatgagatcttctttaatttctttcttcagagacttgaaattcttattgtacagatattttacttccttagttagagtcactccaaggtattttatattgtttgtgactattgagaagggtgttgtttccctaatttcttcctcagcctgtttatcctttgtgtacaggaaggcaattgacttgtttgagttaattttatatccagctacttcattgaagctgtttatcaggcttaggagttctctggtggaatttttagcgtcacttatatatactatcatatcatctgcaaaaagtgatattttgacttcttcctttccaatttgtatccccttgatctccttttgttgccaaattgctctggctaggacttcaggtactatgttgaagaggtagggacaaagtgggcagccttgtctagtccctgattttagtgggattgcttccatcttctcaccatttactttgatattggctactggtttgatgaagattgcttttatcatgttgagttatgggccttgaattcctgatctttccaagattttaatcatgaatgggtgttggattttctcaaatgctttctctgcatctaacgagatcatcttgtggtttttgtcttgagtttgtttattaactggattacattgatggatttccgtatattgaaccatccctgcatccctgggatcaaacctacttggtcaggatggatgattcttttgatgtgttcttgtattcggttagtgagaactttattgaggatttttgcatcgatattcataagggaaattggtctgaagttctctatctttgttgggtctttttgtggtttaggtatcagagaaattatggcttcatagaatgagttgggtagagtgccttcggtttctattttgtggaatagtatgtgaagaacagggattagatcttctttgaaggtctgatagaactctgcactaaacccatctggttctgggctttttttggttgggagactattaatgactgcttgtatttctttaggggatataggactgtttagatcattaacctgatcttgatttaactttggtacctgttacctgtctagaaacttgtccatttcatccaggttctctagttttgttgagtatagccttttgtagaaggatctgatggtgttttggatttcttcaggatctgttattatatctcccttttcatttctgattttgttaattagaatgctttccctgtgccctctagtgagtccggctaagggtttgtctatcttgttgattttctcaaagaaccagctcctcgtttggttgattctttgaatagttcttcttgtttccacttggttgatttcccccctgagtttgattatttcctaccatctactcctcttgggtgaatttgtttccttttgttctagagcttttgggtgtgttgtcaagctgctaatgtgtgctctctctagtttctttttggaggcactcagaactatgagttttcctcttagaaatgctttcattgtgtcccataagtttgggtatgttgtggctttattttcattaaactccaaaaagtcattaatttctttctttattccttcttgaccaaggtatcattgaggagagtgttgttcagtttccacatgaatgttggctttctattatttattttgttattgaagatcagccttagtccatgatgatctgataggatgcatgggacaatttcaatatttttgtatctattgaagcttgttttgtatccaattatgtggtcaattttggagaaggtaccatgaggtgctgagaagaaggtatgtccttttgttttaggatagaatgttctgtagatatctgttagatccatttgtttcataaattctattagtttcactgtgcccctgtttagtttctgtttccatgatctgtccattggtgaaagtggtatgttgaaatcccccactattattgtgtgaggtgcaatgtgtgctttaagctttactaaagtttctttaatgaatgtggcttaccttgatttggagcatagatattcagaattgagagttgctcttggaagattttacctttgattagtatgaattgcccctccttgtcttttttgatgaccttgggttgcaagttgatttattagatattagaatggctactctagcttatttcttcagaccatttgcttggaaagttgttttccagcctttcattctgaggtagtgtctatctttttccctgagttgggtttattgtaagcagcaaaatgttgggtcctgtttgtgtagccagtctattagtctatgtctttttataaggaattgagtccattgatattaagagatattaaggaaaagtaattgttgcttcctattatttttgttgttaaagttggcattttgttcttgtggctgtcttattttaggtttgttgagggattaacttcttgctttttctaggacatggtttccatccttgtattgttttttttttttttttttctgttatcatcctttgaagggctggattcatggaaagggtaatgctgtgaatacttttgtttctctatctaagattattgaaagtttggctgggtatagtatcctgggttggaatttgtgttttcttagtgtctgtataacatctgtccaagctcttcttgctttcatagtctctggtgaaaaatctggtgtaattctgataggcttgcctttgtatgttacttgacccttttcccttactgcttttaatattctatctttatttagtgtatttgttgttccgattattatgtgtcaggaggaatttcttttctggtccagtctatttgtagttctgtaggcttcttgtatgttcatgggcatctctttctttaggtttgggaagttttcttctataattttgttgaagatatttgctggtcctttgagttgaaaaatcttcatcctcatctactcctattatccttagttttggtgttctcattgtgtcctggatttcctggatgttttgagttaggatctttttgtattttgtattttctttgattgttgtaccaatgttctctatggaatcttctgcacttgagattctctcttccatcgcttgtattctgttgctgatgctcgcatctatggttccagctttctttcctatggtttctatctccagtgttgcctcactttggattttctttattttgtctacttccctttttacgtcttggatggttttattcaattccatcacctgtttggtcgtgttttcctgtaattctttaagggatttttgtgcttcctctttaagttcttctacctgtttagcagtgttctcctgtatttctttgagtgagttatgaaggtccttcttgatgtcccctgccatcatcatgagatatgcttttagatccaggtctagcttttctggtatgttggggtgccctggactgggcgaggtgggagtgctgggttcgggtgatggtgagtggtcttggtttctgttagtaagattcttatgtttacctttcgccatctggtaatctctggagttagttgatttagttgtctctggttatagcttgttcctcaggtgactctgtttgcctctatcagcagacctgggagactagctctctcctctgagtgacagtggtcagaacactctctgcaggcaagctctcctcttacaggggaggtgcacagatatctgccattatgacctccctcctggccaaagatttaggccccaaacaggacctgtcccgaagctgagttgcttttgcctgtcccagaagctgttagcttctatattctacactctcacctgtgcagaatactcttggaggagtcctagaaccaacatgtctgcagcagatgctcagtcaaagcgctccctggccgggcagacccctatcctctggtcaggaaagagaccggatgtctggggcccgaaaagggggctggcttagaagctctgtggctcccgtctgtcccagaagctgttagcttctgtattccgcactctcacctatgcagaatactttcggtggggtcctggaaccaagatgtgtgctgccgatgctcaggcttgttcttcttgttgttcttcttgttgttcttcttgttgttcttcttgttcttgttcttcttgttcttccctgttccttgttcttcttgttcttgttcttcttcttccttcttcttcttcttcttcttcttcttcttcttcttcttcttcttcttcttcttcttcttcttcttcttcttctcattctcgttttttcctcctcctcctcctcctcgtcctcctcctcctttcatttgtatatgtttggtgtctttatcaaagatcaagtgactataagtgtgtagttttatttctggatcttcaattctattccattgatcaatgtgtctgtctctgtaccaataccatacagtttttatcactattgctctgtagtacagcttgaggtcagggatggtgattcccccagatgttcttttattgttaagaatggtttttgttattctgggttttttccctttccagatgaatttaagaattgctatttccatgtatctgaagatttgtgttgcaattttgatgaggattgcattgagtctatagattgcctttggtagaatggccatatttactatgttaaattctgccaatccatgagcatggaagatctctccattttctgagatcttccttgatttctttcttgagagtcttgaagttattgtcatataggtctttcacttgtttggttacaataaccccaaactattttatattatttgtggctctttgaagggcattgtttccttaattttttttctcagcctggttatcttttgtataaaggaaggatactgatttatataagttaattttatatctggcaattttgcttaagttgtttatcagctggagaagttctctgatagaatttttggggtcacttatgtatactatcatatcatctgtaaatagtgatacctttattttttttaaccaatttgtatccccttgatgtctttatgttgtcttattgttctagctaacatttcaagtactatattgagtagctttttttgggggtggggttggaatccttgtcctgtccttaattaccgtgagattgtttcaagaatgcctctatttaatttgataatagctgttggtttgcagtaaactgattttattacatttaggtatcgaccttgaattcctgatctctccaatgattttaacatgaaggggtgttatattttgtcaaatgctttttccgcatctaaggagatgatggtgtgatttttttctttaaaattgtttatatagtggattatgttaatggattttcatatattaaaccaactttgcatccctgggatgaagcctactttatcatggtgaatgatggttttgatgtgtacttggattctgtttgtaagaattttattgagtatttttgcttatatattcataagcatgattggtctgaagttctcttttctggtttggctcttgtgtggtttaggtttcagagtaattgtggcttcatagaatgtgttagatgatgttgtttctgtttctattttatggaatattttgaggaaaattggtatcaggtcttctttgaagatctggtagaattctacactaaatccatctggcactggggttttttggttgagaggtttttaatagcttcttctatttccttgtgtgatatgggcctgtttagatagtttacttgctcttgatttaagtttgatatgtggcatctgtctagaaaaccatccatttcatctagtttttcctgttttgttgagtatagatctgacgatttttaaaatttgctccatttctgttgttatgtctcccttttaattcatttttattagatattttcttcatttagatatcccaaaagttccctatacactccccccaccctgctccacaacccacccattcctgcttactggccctggcattcccctgtattagggcatattatcttctcaagaccaagggcctctcctcccattgatggccgactaagccatgtgctgatttctgatattaatttggatagtgcctcttggccctttagttagtttgactaggggtttaatctatcttgtttattctctcaaagaaccagcttttgcttttccagattctttatattgttttctttgtttctatttggttgattttggccctgagtctgactatttcctgcattctattcctcttgggtgcatttgcttctttttgttctagagctctcagatgtgctgttgttagtttaagatctatccagtttctttaccagagcacttagtgctatgaacattcctcttagcactgctttcattgtgacccataaatttgagaatgatgtgtcaacattttcaataagttccaggaagtctttaaattctcttttatttcttccatgaccaagctgtcattgagtagaaattgttcacttttcacatttatgtgggctttctgtagtactttttgttattaatgaccatccttaggccatgctgatctgatagaatacatgggattattttattcttcttatatcagttcatggttgttttgtttgggtcagttttggagaaggtaccatgaggtgctgagaagttggtgtggtcttttgtttaaggatgaaatgttctgtagatatctgttaaaactatttggttcataacctctcttagttttaccttgtctctttttggtttctgtttcaatgacctatccattggtaagagtggggtgtttaaatgtcccactaattttgtgtgaggttcaatgtgttttctgagttttagtaaagtttcttttatgaatatggattttcttgcacttggagcatagatgttcagaattgagactttctctggctggattttcccattgatgaatatgaagtgttcttcttcatcatgcttgatagcttttggttgaaagtctattttattggatattaggatgccaactcctgcttgtttcctgggtccattcacttggaagaccattatccatccttttactctgcgatagtgcttgctttggttattgaggtgtgtttcttgtatacagcaaaatgctggatcttgtttgtatatccagtctgttagcttatgcctttttataggtgagtccattaatattcagagacattaaagagagatgactgttggcccctggtatttttgtttttgtaggtggctttatgtgcttgtgatcctctgcttttgactttgttgtgagattcttaatgttgtgtcctttcattggtgtaggtatctttattgtgttggagttttcattccaggatcctctgtagggctggattggtagttatatatttttgaatttggttttgtcctggaatattttggtttctcaatttatgtttattgagagttttgctgggtatagtagcaaaactatttgttgaaggatactgatttatatgagttaattttatatctggccattttgcttaagttgtttatcagctggagaagatgtctgatagaatttttgttcccttagagtccacaggacctctgaccaggctcttctggctttcatagtctatgttgagaagtctggtgtaattccaattggtctacctttgtatgttacatggactttccccttgcaacttttaatattctttctttgctttgtgcatttagtgtttcgataattatgtgacgagaagatttcttttctaaacccttttatttggtgttctataggtttcttgtacctttatggttatctctttctttaggttggggaggttttcttctatgattttgttgataacattttcagttcctttgagctgtgaatctttgttctcatctacttgggttattcttaggtttggtcttttcattgtgccctgaatttcctggatgctttgggttaggagttttttatgttttgaattttctttgacagttgtgtcaatctcttctgtatcttctacacctgagattctctcttctctctcttatattctgttggcaatacttacatctgtaattccagacctctttcccaggttttccatttccaggtttgcccccatttgtgttttctttattgtttctacttccactttttttttttcttttttctttttttttttccattttttattaggtatttagctcctttacatttccaatgctataccaaaagtcccccttacccacccacccccactcccctacccacccactccccccctttggccctggcgttcccctgtaccggggcacacaaagtctgcgtgtccaatgggcctctctttccagtgatggccgactaggccatcttttgatacatatgcagctagagtcaagagctcaggggtactgcttagttcatattgttgttccacctatagggttgcagttccctttagttccttgggtgctttctctagttcctccattgggggcactgtggtccattcaatagctgactgtgagcattcacttctgtgtttgctaggccctggcatagtctcacaagagacagctatatttgggtcctttcagcaaaatcttgctagtgtatgcaatggtgtcagcgtttggaagctgatcatgggatggatcctcctggatatggtaatcactagatggtccatcctttcgtcacacttccaaattttgttctctgtaactccttcccatgggtgttttgtttcctattctaaataggggcaaagtnnnnnnnnnnnnnnnnnnnngtaggcaggcagccctgtcagtatcggaccacctaggggtcgtcttacaactggggtctcttcacagggacagagaagctgctgatctgttgccttggctgcagtatgtttcctgggaggcctttagacaacttctctaagtgcaatgggtcctcaactgctctaagtgcaatgggtcctctagaatgtatcagaatatggagtcttcacaggaacagaccaactcggggtctgccccagcagcaagaactgagcagaaggggtgaaaaggatggaaggggagtggtatttgggagggtgggtgatgggtcccgagtccactagggtcttagcagcagctcttggactgtgtaggtgtgggacttaccaactgagtgcagtgggtcctctagaatggatcaggatatggagactacatgggagtagaccaactaggggtctgccccagcagcaaggttccaggctattaatattatctttattctccagaatttcatacttacatgcaacttttgaaaaattgtgattagccactaaccttatgtataatattcacttgcatttggagaattctgttttcaataatatcaagctattagcattaattccaataagatgttaaatgaaccacatgataaatcgaaaatggaagatttaggatgtaattaaatgtgagagtagttaattcttccaagcatcattgaaaaatattgaaaagttttcagatggtgtggtgtgtgtgtgtggtggagggaggcagaggtaaagattcctaattgaaagaggttcagtgtggtgtgtcctgtaagaaaacatatttaaaggcttgagacatggatcaacaattaagaaggcttgcttaccttccagaggacctgagtttatctctcaggaaccatgtgcaacgctacttccagctgatcagacatctgcctctgcactctgtggaaacctgcactcatgtgcatactcacatataaatagaagcagcaataagtataaagaagaaaaagatatgcttgagaaatacaaatgcttgttttcaattttttgaatacttgaatagtgatttatacctaagatcatttggggttgtatactctccttaaaagtcaagtacatctttgcactagtgtatattcatgcatatatcatgcatatactcacttgtacacattcatcatcctaaaagatattctggaaaggcagtaagtactcttagctgctgagcactgagatatatttctagccccaagaaagttcaagttttgacctttctgattgctctgtaaataattggatgtttgtatgtctttgtctatcattttttcacatatccatataagcgtatctggtctaaagtagaattcaggtaattctaatattttttaaaacgttatcttggcattcatagtgttttttaatggatttactgtattgttttttaaatgagttactgctgtagacacttgagagaagccacagcaagctcctggtatagtgagtgctgaattttgaaaagataaaatcgcctgagattagaacatgtctttgacattttgttttcagtcagaaggaaggtcatagctaaaaggtcaccaggaagaattcactcagcaaataaacaatgctattattttgcaagaaagtgacaaactgctctctataacccattgaatacaaaggggtattgcaaacagcattttaaactcacctctagccttccatttctaggttatgaaatgtaaaaagaaaatgaaatcatgctcatcttccagtggttaatgcatgatacttattttcttcttagcattttagactttgaacttagcattcaaatctcagatttgcttagcattttctatgaagtaattgtgtggtacaatttttgcattcattccatttatttgaattgcctcagattagaatgatccatctctcttccctgtgaagatcctacctctcttatagttagctttttacaaaaacaaaaacaaaaatctaaatttactgttaaatagtgtgaaaatgagaatgggcttatgattaaacatcaaaacctgggccttcttgaatagtgcaaaacactagttcttagttgttttggtgtactgtgtattaaagtatttcttgggatagacatgttaaattgattctaaaaaattccatattgaaatcctagagtttaaaaagtagaggacatatgtggtagtgtactattcctacaatgtttatacttgggacttgaaaacaagatgatccggagttaaagggtagtctggatttcataagacccttgcataaaaatacataaagtctacaaaacattctttcaatgtcaaaatctatttcacatgctcacttcagattgatgtctcattagcatatattttgaggcaaaataatttaaaccttaagtcctattctttacggaaaacaatacaaaggtgcttgatgatgtatttttttttcttttcagatgaactaacaaattcttcagaaacaagactgtcactagaggagcttttggggaaaggattcggacttcataatccagaacctcggtggatcaatggtaggtgtagaacttttcatgtgtattgttagtttgagttctttttcactaacataacacagagtgatatgatacttgaagtgaatgtattcatgtagctcatcctagaatcaatttcttaacaatatgccaatgtagctatagctatttttatatgtagaactgactgtggtgtactgtgctttttttttttttttttttttttttttgccagaaataaaacatcttcaatttcccttaaataaatgtttggaattaaaacaaaaaacaaacaaaaaacaaaaacaaaaacattgtgtgttgtaacttgagcatctgtttgtcttaatggaagctaataaggagttattagctaaactaaccataaaaaatgtgtctgtgagaatagttacatttttttttaattttgagtgtataacttgtttgaaagtatgctaataatctcaaggggaaagcaactaattgttggcattcaattttgatatttaatttttgatattctttagatgtgttctttgtttattgtttctaggagatagtttatataacagaccaaaagttttgccttttgatcagataaagacaatcatatttatgctcgatttctccaattaaaaaaaaagaaatttagaatgtattacatctaattatgtagaaatatgttaattgagatgtatagacttttttggtctcattagttttggcacatttttatctgaaagttctttataataaagtctttttcctcttgtcttttttaagacacgaattctctgtgtagctctggctgttctgaaagttaatctgtagaccagaatgactaaaaattcagagatcaactctccactgcctatcaagtgctaggattaaaggcatatttcaccatcacactgcctaacaaagtcttaataataagaaattaacccttaatttttggaagctattaaaagaatatataaggctcaaatcaaacttgtttatttgacctcaaaataatttctagaaataaataagaatatggatgtatattttaaatgaatgcctttaattgacacataataacattttcttgtatatatcagttaacattgtttggaatgcaattttgtgtcctgatatttgtagaggaggtagaaatatctacaaagcatagattttcttaatacattttcatattttcttttggaatttttcataaatttgagatcagctatctaaggaattttgcttttcctttatgattacttaaactgtatagtttcatcacaaataagtattttcttttaaaaaaaaggctaataaaatatttttgtcaatatacccaagatatagttgcagttctgtaaaatgtccatataattgtcaacaaatattttatcaagttagttgataacaggaatgattccagaaggatttaaacattagtgacactgaaaattactagactcaaaattttgactgatcatcttttccagtaaatatgggtttaaaccaaaatgtaggcatttctgtagtgaaactttagaatgggaggggaaaaaaaagtacacttttcaatccccttctcaggctagcttgtactgtttaaagatgcattctactcctttgtacagttgacagtatggtgtcctaatacctaaggaatgaactgacatttcagcacaaaactgcatgttaggctaaaattcacatcatattgtggacaaaatttttgcttttataattttcaaagtttgaagatcaaatatgttaatttttaaaaagtgatttcattaatcacctctggtgaaattgacctggatatggtacatggggccagcacagtagtgttactacaactataaaattctaatccattggagacatagtgtttataaaaggatttgttatcaaagcaaaacttgaaactggaatatacagaatctaggctctgaaagtaggcaatctatgtaaataccactgacgttatctccttattacttggagtttgtagacaataattgtttccatagtagtagtgttactggagttattattatcagagcataggtcctgacatttccccataggccaggttcagttatacaacctcaataatctgattaaacaaactaataatggaaaaaggagggagggagggagggagagagaaagagagagagagagagagagagagagagagagagagagagagagagagagagatttatgcaatatggtaacattggcaaggggaacaaagaaatctggaactgcgccccttcccaagtttttctttagggtctttacatcaagcttatacttaaatagacagcaagggttatatttacaactaacagtactggtcaagctgtgatcttgcccatgttgcttcctcattgtctgggttcctgtgtctcctgcaagattgcaagaaccatgttacatctctttcctttcagacaagctcctcttttggctgacaccgagctttagcctttttcttctcctgtcatgaaatttgtgaagaaattccaaatactttggagaccattgttttaataatgtgataatgaaatggagggacacaagtgtgtctttagattattcttattcttttaaaacaatagttttttcttcaaaaattccataaatttattcaatgtatattgattgttcccattgagcaatatcctctgtatgctcactaatgtttgcagcccatctcgatgacatactcattcataactgagaaaatagaatgcatagatctatgctctgttcaggctcactccccttgctagcagtcactagacactttatttatttatatatttcacagatagccaaaatattggagtgggaaccacatccaaagaaatgtgaccttgaactccttatcttcaagtttatcaaaaagtgaaagatgggctttctctttacttttccagtcttcttaacataaaattcacctgagtgaattcaagctcagctcattttaatgcttcatctaattcttggaggtcatcctgtgaacacttaatgcattatcagtcaagagaaggatggttcctagctgaccctggcatgtatattttcattgtttaaatctttctaattataccacattgagacctaataaactgtattttaaaaaaattgttaactgctacacatttactttgtgattagtttgtgcattagtgaaggatccaatactgaatgccttctttgttgagcactatgagagatggtgttacacatgctgcatgtgacagcatataacactgaatttacatagaaccctgaggttgcatctagaaactgtttcagatacaggggctaaaaaaaagcctgtcttatcttattatgtaatagaataagtctattcttagatattttcatacatgtgtaaagttcattttgataaacttcaacccttcttttccccttatgacttccagattcaccttgtgtcctctcactcctccttaatttgtatctgttttgtggttgttgcttaaaacccaccaagtcccataagcactgcctgtatgttcacaggtataatgccatctatttgagtcttgtctacttatcaagggccacaagcttttaagaaactgactcctccagtttagcagacatcagctattaatagctccgcagctgggtttgggcttcatctttgtgagtttctcccaccttcatggtaaaatgttgactgccttgatcttgtgaagttattcattgcacaagaatgattcattgctctcagattcacttggtagatcaatgtttatcttcagccactaacagagatgtaccattaatgttttattatagaaagcaaacaatagtgttgatgtaaaaatggaacaaccatatcaaagaatgtaagagataaatttttcatggttgagtgaccatggcccaggaagacaagtttagattactccagttccacatttcaacatggtaacagtttaagttcgattactagcagaggaaagaaagttattaagtttaaaatacattgctagagatattaatggtacagattacatcaaaaccaggggttctcagttgctctctgataatattcttagattttagtgcttaacatcagggttttgttaagccagtgtattccaaaaggttttatatattatttgtaaggatgttaataagtcacatatgtgaagagaaatggctattaacagagccaaagataacccaaggtaaaattaggctaataattataatcaagttcaataagggacctgagcctacaacatgaaaacctctccacagtcaatgatgttgttatcattaagtggccatgcatatgtttctaaatgttagatgaagtatttttcagaatttttttataattttatgttttttaaagatttatttatttattatatttcagtacactgtagctgtcttcagatactccagaagaggggtgtcagatttcattacaaatggttgtgagccaccatgtggttgctgggattttaactcaggacctttggaagagcagtcagtgctcttaaccgctgagccatttctccagcccccagaattttatacacacaataaaatacatcatatatagcatataagctcacacattgtgtgagctagacttttgtagataatcatgtttcttttacttttttgcccattttattcaataaatgtattgtgggcatagtttttgaaactaataataataaaaatgtttcttcttctgtcacagtttcacggatctccaatctcccacctgcctattgtcacacatatacaagccatagcaaataactgctaaagtgctttgaacattgttcatcagtgacataaatgactgcatttcccagagctccccagcacccctatgatctgggctatcatcaacattcattttacttcctggaacctcttccaaaatctgatagtctaagtttcactttctaggaatagttgatgtttatgccagcctctgttgtcctctctgcaagctatgaggaacatccctgtcctagttagcttaactgttgacttgacacagcttagagttacctgagaagagatgtctcaatcgagtggttcgaccataggaaaatgacttgtggttatgtctgtggaggattttgttgaatgttaatttatgttggaaggtccagcccaccgtgggtggcaatattcttcagaggtggtcttggactggataataaagctaactaaggacctgtgagcaagctaattatgcattattggctgtgcctgagttccctggacagaagaaatgcttcatggaaaagcagtcaggtatgccttcaggttcctaccttgagcttctgctcagatttctcttttacctggaactataagccaaataaatcctttactcccctaagttgcttttagttgtatgtttatcacaacagagaagcaactagaataaccctctacacgcacacacacacacacacacacacacacacacacacacattccccagctctgtagataatgctggcactaaactcatggtaaacttcctgtcttacccttccaactacttccaaagacaggtgttgcatgcttaaccattatgcagattttctctgatacagaaatgtttatatatcggggggggggagggctgtagcctcatagatcacaaaatgagaggaacctgcagccttgtctttagagatgctctggagacctgatatttctttataaatctccacagattatattctttaggaagaatattcgtgctcttaaacaggcatggaaaagacatggttatcacttttatgaaaaatgaagggcattaatctaactaataccaacattatttactatgattacagatcccagcactgggaaaagcaagaacataaattcatgctactgttgtttatgtgttgaatgactttactaggcttggcctttcatctgtcatcataacatagtagagttatagaagccgttgtgcatcactgtcctctttttaacctcacctagggctcagttaaattattttatctttaatttctgcttttattttcttaagcactaagttcaaacattatataatattttgtctatttaagaattgaacacatctgtacaatgtattataaccacacccatttccacctccaattccaccaaactgtaattgttatgaccatcaaatatgctgacatttacgtagcatagaggtgattatatatcttcatgtcttagagatggcatgcatttttatgccgtgtaatttgtaaagacaaaaaatagtccatagaaccacatacaaacttaaacataggaccatgtcattttgcaagtattgaactgaatgttagataggccaaaatattcatttgtgcacccatgtccacacatgtgcatttgaaaaattatttaccctagaagatatttattgtaaaatattaagtaaaaagaatgcactatattcaattatttgtacattcttcacaactttattccatacatgtccatatctattaatgcaaataccagaaaagaatgtggtaaatatcaaattcaatccaatctgattagatgactatgagtgggtactcttttaaactcttttatccatacttttcagatttccaataattatacccttacttttaaacaatcagacagttcctagaattcacatgctaatgtaagtagattcacttagtgaatagttttgttcctattgatgagattttttttattctttcaaaccaattatggatgagtacaaaaacaggaggcaaggactgacaagatggcttagcaaggaatggtgcttgccaataaggctgatgaactgatttctctcctctggacccacatggtgcagcgagagatctcactcctacagattgtacctgacctccacacatgtgccatggcatgaaggcatatatatgtattttaaatgtaataaaaaatttaaaggagacacagaggtgagctggtagtttgagggcattggatcctggcagaggcacaaaagagtgtattatacataacatttcaaggcagaagagatggctcaataattaagagtgcctattgttcttttagcgcccacacgtaaggcagcaagccacagcttgtcactccaactccagtgagatcgagaaacctctactgtcctctgactcattatgctctgacttctttgatatatgtagagaattatggaaatgatgatatccttgattgctaaagcactgcttagaaagttgaaaatctgggtaggaacacaaagcatatttttttcatgacttattttccttcttagagtatgtatgccaaaatacttttttaaatcaaggtggacaagttcttgatgaaatgagcaaagggcttgcatcagtatactgcttagcacattttcatctctgaaaacaccagaagtactttattgctttattatctgttaatttctagcttaaactgcttgaatctacagatatatccatctcctaaaaatcgcacacccgagcaaacatccatattagagacagatagtcaaactttgtttgaaattcaaatttacataattttcttaaagtggatattttaaagaatccagtctatcttaaaataacaatatttatcctaaatgcccagagagactaagaaagaatttactcataaactgaagtgtgcacatttcagagggaaaatgtagcatccaggagaaaaatacatctgtgatttagaggtgaagtgattgaagaatttaaagggaactagaaatataaacttagcttcaagagaactacatgttctattccttgtgtttgttgaaatagaacattgtattttgatatttaaagaaataaaactgaggttgcttaaacagagtggcatgggaatgtttatatagagaatttattgatttgtaactcatgcacgatttagaatctgttgacatagaaaagcttgccgtgaagtaaatcgtgtccatgaagtcatgtggggtcctgtacaagcacaaaagcatgcttagtcttcactttgttggcacaatcactggctttcccatcaaaatcgcacaactgtggatgtgttgatcccagtatcttcatttctgtatatccacttatatatccatctaagtacttatctgcctgttctttttatttattcagcactaatctatggtgcatagccaagacatattttatatccaagtgtataaacattccccttcactcaatgaaacactggtaaagattcttttcaagtcatgcaccctatcttttcatattgtctcaggctttataaaatgaacatactagtcagaaaagtgaccaggatgcaaagctgaaatacatagagaattgcaggacctatcaatccaagctgtgataaggtttgatgagctttaatttcccctaaatttaaaatagccttcattgcgctcaccagacactctctctccactataatgtgggactctgggtgtatttcttcttactctctctgaattgtttccatttgctaacatcttcaaatatctggtaatgatcatgaatggatccatgtatcactgatgtgatcaatagaatcagaatacaatgaggattcttagagtctatagaaactacatgaacacaggcactgaagagatggctcagcagttaagggcacttggtatttgctcttgaagagaaacttagttcagttcccagcattcacattgggtgactcataaacacttgtaaatccagttcctggagacataatgctcttttctagtctccataggaacatgtattcatgtgtacctatccacataaagacactcataatgaaaaatagaaaagaaaactccatgagccctcttgtttcaaagcaaggagacggatgttaagtgataaaggtaatgatatttttacaaacagatcttagaactagaaggatacattgaagaagtagtgaatgattggcatagtctttggagaagtgatgaggtttagagtaggcatagaaggcagatgtgctcagatcatgaaagagagcattttggggacaaaacaatgatgtatgaagacttccatgggaattagcacagtgtgtaaggctgcctatgagaaacaggctatgtttgataaataaaaacaatgaatacatttacagtttggatcaccttgtcattttactgttaatattatacactgatctccagcaggatactttgttagattaaaactttgaagcaaacaaggctaaagtgttgctgatgactgttagctatattttgccaaattaaggtgggaggttctgatgacaaatatttaccttatagtatatcagaatttacatgcaaatctgtgtttacagagcatttccatatatgttatttttccaggatattttctttttgaaaaaccttgtttggaaaataatgtcattatttttaccatttacatgagtaagtggagacctagaaagggaatttttacctctacaagttgcaaaggcaataatggcctatgggttgaagcaaggtcttctttgaccagtgctggaggaaacatgtgggacatgagtctattaaataacaatgatatattctgacattagatactatgtatgatttaaaattctaccagctcatggaaaacatgtggggaagttagataataaaaaggtgagatttctggaattgctagaattattagaatattttaatttgactacatctagatgattttgagaaaattaatcatttatgtacttttaaaagaaagtctttgaagtcagtcataatttaaaaattcagcacatatagggaaatttttcatattactatcctaattcaatttactttgcttcatggttccctttttctgtgtatgtatatacttatctcttcagaactgattctacttgactaggtctttttcatcaattttaatggtctatcaagacctctgtatgatgtgcaaccaaatattatagaccccaagtttttattgggttaacaaatgcattcttaggtggctgtcaggtgaaaaaataactagagacaatatttttactattcggtggctgacccacaaagtaagtcatttaaagagaagtatttagccatgttgaatatttttcatatttgcagtggttttctctagtatatgtttaaggaagtgtacacagaacagatttaacacatcctttctcctttctgcctaggttacctgtgggttgacagtgaaaaagaaaagtgtgttataatttgcatgctactataaaaatgtagaaaatgaaactgtgatatctgtcttcattgggtcattattatgctcctgacaactgaagttatgctttggggacctccctgatattcagctaccttgtactgcatttttaatttgtcatagataatgtgtaaaattctctgagtttgagtacagacatgctcattttataaacaaagaaccgcagtttaaagcaaatgaggaacttggtcaaggccacagtactggaatataacagagtgagaatttaagttcatgtgttctctcttaatgagcatagtgcctgtgatcaaatagaagctcaaggaccagagtattaagggaaaggtaaatgtcaagaagagaaaattaccttgagatgtagcattaagtacatgtaggataatgtagaaaaaaggggagatttgatcaacttacacaattttgaaatattgtggatacagagcaagcctttaaaactgttgtagaatggtaactatgtagttcaccagaattcagggtacttgtgctcaatacttaaatgtttaccttgggcacactcactgccttcctggagctcaattttagtcattgtgtgtgcagtatttactggcatgacatgtaatatctttacagttttctttactttagaattattcaaatcttcatgaaatagtccaataatgactataaatcaagttacaatctgcagatctgtacattctaaacttcatggtctattgataggaaggtgaggtggcaatcatcaacactattattgttttagagttctttgtgctcattcacagaattccctcccatttttttctactctcaaaggttagcctcaaattccaacactattgttattttaacgtttattatttgaatctctgtctgtgtctctgactcccctttgtgtgtgtgtgtgtgtgtgtgtgtgtgtgtgtgtgtgtgtgtatctgtgtgtgttaccgttattaaatttcttggagcaagagttacaaattgttttatttcatcctatgtggtgggtatttgggaacattattctagtctgtaagagctgcatatggacttaaccacaatgccagtttttcagctctcaagactattttttaaaataagttctcatgccataacacctctagaaacatatatccatctctatctctatctatctatctgtctatctatctatctatctatctatttatctatttatctatctactttttttgacttaaatgttagcactgtttccaaagagctgactgttttagggagtatagaaagtccaatgtggaatattttagttatgctattatcttgtaaaatttttcataaaagaatttgtcagacttttgctatgaacttttctattatgttttaaggtggaaaattaatattaatgtgctcacatgtatgtatttatgagttattatgaatgatttctaatatttcatgaaacatatttcatgcaaggacacaaatatgaattcagttcataagctggaacatacaaatatttaaccggaagagtaagaagaattagcaatgctattgcagatatgctagacaaaagagtgctttgcaattcataactaatgtataaattatttttaaatattccttcatgaggagtagttgcagaattgcagcatccatatgtttttaaagacatatgagagtaggtgcagggctatttgagaagaggaagggaaccaccttggaaattcaggaccgggaaggtgaacataatgacagtatattaggtgaatatatgaatatctcgtagtgaactccatttcttatataattatcacaggttaattgaggaaattgattaaatttaaagatgtgggttcaggaaaccaaacatgggtattctgcagagcagttcatgcttttaacttccaaatccaggtcttcagtcatgtgtgaagtggcttcactaattgagacatacgctttcatatatatcttctacgtataagaagtgagctccacatccatcttgaatactaagagtgtgccatttcatctccatatctacaaagaggattgctttaacctatcagctttgtggtgcttttattcaggaaagaacaaggagctgatagactgcttctacttatccatgaaccagggggaagcaaaacacaaaataccacaaacgcacctctgattggagacagctctcggctctcattgctttaactagacacaggcgatgttaataaatcatttaaaactgatctccttccctacctctaatctgtaacacctagccataggcatggtgttgtcaatacacatgtcagtttaatgagctggaacactcattacaagagctgtgtacccaagccattaacatgtcaccactgctgtgtccttacaaatagcatttcaaagcaggtcttttgtacatatttgttctctgctgatagtccatttgtacaactaagtgtaccaattcattatttacacatgtgcctgtccttctttgggacagggttccttgatttctgcccttcatagtcctgctaatcctttgtcttctgagcctccatgctgtgataaaataattttgatttgtgctgtactccttggcttttcagtcaccccaagatctgatcctgttatgattaagggttgaagtcatgaggctatttagagacttgattaagactttgtggaagccagtgcatggtgaatggtctactctttcggagactaggtgggaccgcatcttggggactgagtgggactgcatcttgggcatctcaacattgtcactttttaaagcagtgcatctttcaggtataggtagcaagccagcctgtttgagggaaagcctcacggttccagaagccaataacagtttaaggttgagtacttattctctctgtatggttgtcttttcaactacaaggttgagaagataattggtttttgttttttggtgtctttttttatttttggcctcacttctaaaaatgaaaattttccattaattttccccaaagtacctacaaagcttccaaaggatcttttcctcttttcccttttctatccattataatgtgtcccatctaattcacctcttctcaccagctggcatcctctgagagcttctaagatttctccttgcattgcttgcttagtttttctcctatgatattggtcctaacttcaaccccaaatatcttccacactgctactgaaatattgattctctgaataatttcactgtagactgactaccttttttcttttatttcaggttcaaatactatatttcaattaataaacagcatcagacttgggggcaagcatttttaccaatagaaccatcttgccagccccaaatataattattttagtgcttctccaggatgaacatgaccctgaaattaaaatggaaattaaaagagtgatatcaattcagcttttgtttctcaaaatgattatctataaaaagacacgaataaaagcctgttcatttttatgaatattcatttttaaattataccaaggctttttaattgtaaataatataactgacgttaatattttcgaaggtagaaactgatatgctataaaaattcaaatggacaaaaacatttgtcgtttaacattttcattagaatctcatgatttcaatttgcaagcaatttagaaattacaatgtttatattatagttctgcctccacccaatatgtaattttgaaaataaaggtaattaattttaagcaatgcgatataattagaaaccattaatgatttcaacatacattgtatttagcacctataggtgacgagtgttgatgatcattattgaaacgttcacttaattcttttcaccattagatttctacctcttcttgatctgagtccttcaacaatgagagaaaggtaaaggtgggaggaaagagagagagggagagagagagggaagagagagagagagagagagagagaagagagagagagaggataagaatgcaaatataaacaaagctttgagtccacaggtatgctagctggaatgtgccatgagcatttactttttgttaattggcagcatcttcatcctttgggaaatccatagggcttgaaaacagggagtgatgctatagatatgaaggcttgctgtagcatacatgggcttacagcataagctttagtattaaattatgtttgtcctatttatttaaatttatattatctttcaataagtagtatgtgataaatacttcaaacacctcacgatacagaacttattcttcatactctgtggatgatttggggcaatattaaaattaaaacagtaaattgagttatgtttcctcaaggaaatcaagaaaaaatattacagtcactacaggaagcaacctcatataagaatgaacatgcagtttctacccatagtattttgttgggataattatgtaactggcctggagcttacagaacaggctagactggctggactgtaggtccagatatctacgtgtctccaattcccagcactagaattacaagtaatagacatgcctgtttttacttcctcatgagatttaggtgtcgaactcaggtcctgatgtgagtaacactaacacatgaccaacttagctatctcccacgttcctttaaactattttttagagaatatttgatggggtgagagagatgaattagttattaagagcacttactacctttgcagaggaccaaagtccctgtatctaagctggccagctcacaatcacctctaacttcaggaccaaggcatatgacaacaacttttggcatctgtagactcctttacacacatgatcatattctaatctatgcacacacacagactcacacagacacatagacacacaaacacacagacacacagacacatatatttaaaatttgacagtcttatggaatctattaaagagctgcctttatgtggtaatatttcctcataaatgtaatatttatatgccaaaccaactattttcattaaatttatcaggtacttaaaaacagcttctccacataataactcttagttgtttgaatttgagcatccacagaattgattttctaagaatagattgcatagcaatagcagtcttccctagaattttagaaatccacatttcagtctatctaccaggaaaagattagcaagcggtccctccagcatgagatatttgcaacctagttagaaagagaaagggataaaagaaactgatagcacccattggtgaggggtactgacagaggcctttccaaagtcagaataattctataaacaggtctatactttcataccaaaccagatgttttatcttggagtattataagcagagtatgcatttatatcaaaagaggtagtttttctctttaaaatgtataagaacatttgctgttttcctctccattataacaaaatatatattattgaagttttattctgggttgtacttggtgtcagaattgtcatatttgaaggaaggtaaagaaggggtataacttaattcaaagatggtgtagatggtctggagagatggctcagtagtgtgtattgctctttccaagggtcacagtgcatttctcaccatccatgttggtgagcctcactcaactgcctctaactccagatcaagtgaatctgatgaagtgagtctttctttttatggcctacacagacaacttcactcatagatgcatttacccacacacacacaaaggcaagatcaatctctaggagacaattctgataagacatttgccaggtatgtattgttgtttaaggcagcaggcacagcagtgggaagagatcctgtgctaagtaatcctcacagaatagcagaggtgagggatggtgggggtgaagaggagtcaccacacaaaaagagtattcagaggcattccaacctggggaaacagtgatggcttttgaatgtacagttgcagactttgggaaagtctggacttctctgaagtggacatttctggttggttcatatggtgtagactcatgtgctctcttgctaagggaagagccgtaggaggagacatgatgtttggagagagtacaaataagacccaaaggacagtgatggtgaacttgcatagctaaccttgccacacacacttcattggtctcgaaactttgctgaccttcactttactgacagaggcaagaaagaaaacttctactggtgtcccagctggttctggtgactctcattggctcatgctgatttgttagaggcctggctgtttctgctggattgtgttaccactgatgctgattgtatttggtatcctagcattactgacctagactgctgctatcctaataagtggagactgaatcacccaaacaactacttcacaccaggtccacatccccttgtcctatttaccatcttttctctcctacctttggacagtgggccagaaggtggtgggggggggcggtgccaaatgtttaaaatcccttatgaaaagtatgttttaacaaatctatgactgtacttttgggttgaaaacttgatgattatatctcaaaaattacttgccttgagccaataaccagatgaaaaacatacaattttattaaaatgtcatgtatagaatagccgtgaatctctgtgaaacaccatatattttatgcttgaaaatactcttcaagggtgagaaacaccaagggagttgcaggcaactttagagccatacctcacttttatgtgacagatgaatctagagaagagacaatgtctctagaacaacgatccttgagctaaccatcttacctttattttaagtgtcttcctttgtgatatgataactcgataaagtgcttgccttgtaaacacaaggttctgagtctgatttccaggacatgaaaatgctggacataataggagatcattgtcactggagaggaagacagaaacagaccccaaagttcactggctaaacaatgtagcctgtttggggaggtccaagccaatgacaatcaaggtggttaacatgatagcatttgagaaatgacacctaagattgatctttgttttatacacaagcatacatacacatcctgtacaaagaacacatgggatgcctgggatgcctgtgcatggattctctttctttctctctctctctctctctctctctctctctctctctctctctctctctccctctctctctctctctcacacacacacacacacacacacaaagtcatctttgatgaatgaagtttcactgagattgaagacaattgaagatagttccacaatgttgactccactgatgtataatgggaaactaggatataattttttattaccttatccataaaaagggaagattgttttaagctagcaacatgtgtcctggagtcttttatttatttctcatagaataaacaaaaatagaataatcaagacagaaccacctataacaagcctttactcacctgattaacatgggtgactgtgccttcctccagagattccagaaaaggagacaagcaggcatgagtgttgcatccttgtcaggtgatgctccctcattagagatgcttaggacgaggagaagctctgagatgggtgaacaacatgaagaccttaaatacgttgtcttccatcctataagcaagtatggtaatgcccacttgtctttttctttttgagagtgaggtgctccttgttatgaaataaatttaattcctttattaaatgatttttttaaaatacagagaagtgttcccaagctgataatcttgctcttatcttagacttacagcacccttatttttgtcctttttcataaaataggaacaattcataatttcaatgtttttacttattgatttcattgactacctaaccttttcagttattttgcttcttgcatcctgatggcttgcttacaattctaacactgtgatgaaataccatcactagcaagttagggaaggaagaaagggtttcctttggtttacatttccagatggataggccctatgcttgcatggtagaggatgctaaggagcaagagttccggttatctgatcattgttcaactatacagatcaagaagaactaaagagaaagagataaataaataaataaagatagatagatagatagatagatagatagatagatagatagatagataaaggttgaataagctatgatctctaacagtatgtgcccctcaccccctgtaatgacattccttcagcaaaggttttgtaacctccccaaagagtgccattaactggaagtctagtgattaaacatgtgagcctgtggggtacatatcacatttaaactgtaacaccttcaattctaggccagaagggatttacttggggccatagtccagggaacagtctattatgttgggtaagacaaaggaggctgaaccagttcttgttagtagtgggagctgtggctgtgaccttacatctcagtggctgtagaagcagaaaaagtaagcacatatgttctcattttcaccttcattccttctgaatcctgagcctatggtatgatgctgcccacactgagagacaggatcccactctcagttaaactcccctggaagtgcctccagaagtgtatctctcaggctgattctaagcaagtagacagggaaagatttaaagttttacactgaagttctaagactctctatgtcaaacatctcccttattgtgtgggtgttatgacactatacagaaaggagcatgatgcttgtgcagctggggaaagtttgtgaaatctttaaagaaatgccaattttgatatttcattaaaatacatttccatgataatattttattgtggttttaattttgagatagggttttttatggtgtatccctagctatcctggaactcatgctgtagaccaggctggcctcaaactcacaaacatctgccttgttttgcttcctgagtgttcgtgttaaaggtgtgtgttaccaccccctggctttctgactctatactgacttttaaaaaatgtttagaaacgacgggtttgaaattacctttagttcagttgttttacctttatgagttggttttcatcacaaatcactttagataatttaaattttctataaatatgtatggatcatttttcctctatcaaaagccaaatattattaaaacactgttatcttaactaaaatatatcaaagtgttacatggaagtaattttgaaaataaaatatttttatcatcttagtcatttattttctttttaaattttatttactttttgtcttttaattatttgtttatgtatttatttacacttcagattttattcccccaccctgtccatcttccaactgtttcacatccaatacctcctccccacctcctgtctccatcaagatgtccccactccctaccccctaccaagcagatctctaaaatccctggggcctccagtctcttcactactgaacctagacccattagtcctctgttttatgtgtgttgggggtctcatattagctggtgtatgctgcctgtttggtggtccagtgtttgagatatctcgggattccaatttagttgagactgctgatcttcctaaagggttgccctcctccttagcttcttccagcctttccctaattcaatcacaggggaaagcagcttctatccactggttgggtgcaaatatctgcatctgactctttcagtggcatgctgggtcttccagagtgtggtcatgcaaggtccctttttgtgagcaccccacagcctcagttatagtttcaggccttgagacatcccattgagctgaatcccatttggggcctgttgctggaccttcttttcctcaggatcctctccatttccatccctgtaattctttcagatgggaataattatggatcagagttttgactgtgggatgacaaccacatcccttacttgatgtcctgtcttcctgctggaggtgggctctataagttccctctcccaactgctgggcatttcatctaatgtccctcctcccccagttgagtcctaagaatctctcacttcttaggtttctggtgcattctggactctcccccacaatttcctacctcttgaggttgccagttttcactctttctgctggccctcagaacttcagtcatttttcctcaccaaataccagatcagttcccctctttccccctaccacatgtccagtttccctcttgggtacctccctccatccctcctcacttgtgattgctttcttccttagatgcagaaaaagcatttgacaaaatacaacaccccttcatgataaaagttttggagagatcaggaatacaagtcccatacctaaacataataaaggcaacttagtgcaaaccaacaaccaatatcaaataaaatggagacatacttgtagcaatcccattaaaacagaggaaaagacaaggatgcccattctctccatatatattcaatatagtactttaattgttctatagctagaactataagacagcaatttgtatcaagtgattacaaactggcaaaggtgaaataaaggtatcattcttctcagatgatatgatagtatatataagtgaccccaaaaattataccagaggatttctccagctgataaacaattttagcaaagtggctggatatgaaattaacccaaataaatcaatagcctccctttatacaaaggataaacaggctgagaaagaaattagggaaattacttccttcacaatagccacaaataatataaaatatcttgggtaactctaaccaaacaagtgaaagccttgtatgataataacttcaagtctctcaaaaaaagaaatcaaagaagatctgagaaaatggtgagatgtcccatggccatgaattggcagaattaatatagtaaacatggccattttaccaaaaacaatctacagattcaatgcaatctccatcaaactcccaacacaattcttcaaacacatggaaagagcaattctcaaattcacctggaaaggcaaaaaacccaacatagtgaaaacaattcttaacaataaaagtacggctggtggaatcaccacaaccaacgtttacaacagagccatattgataaaaattgcatggtattggtacagagacagacacattgatcaatggaatagacttgaagacccagaaataaaaccacacacttatggacacttgatctttgacaaagaggccaagaagtagacaatggaaaaaagaaagcatcttcaataaatggtgctaatccaactggctctctgtatgtagaaatttcatttacttattcactttacatcacaatcactgaggcccttcctggtcccctgccctgaaagttcattattttaagaacaacttgacaccccatgcatcttttggttttgttgactatcgtcggaggaagaatatgaagagggagttttattattatacataaacgcatgcaggacaacaaaaccttgttcgggtcactatgtaatgtcctgttagtttcagaagtaccagtcaaccacaaagaagttataggaaatgcttatcagtttgatgactagagactgtattgctatcctttctcattattagctcttttcttggtcttacatttccactcatttttccataatatttgttgctgtgaaattttataagcccttgagtttctttaaatatttagtcatgaaattcctccagattttccatttcaggaaattcatccatagattcagttttcttgattgttttgcttcattatattacttcacatgtaatggaagtatagccatcatggaaatcttatatagagctgaaaagaaaacatacagaaaaccttgaaggagtgagtgtgaaatcatgaacactgggattaaaggcctgcagttctttaaaattgcaattttgtttgggtctttctctctgcctcggggcattgcttatggtagtgaatgggacggaaatcattaccctttagaggtaggaagctctctgcaggctttatgaactctacttgatttcaataagtattaaaaggttttctaattttgcagggttctgcattcatgaaagagccaggattgattctgttctgaactcagcaggacaaagctctttgcaagtgtgaaaaactcttaattggcccacatcctctccttgggactatcacccagtcagagaccattacttgaggtaactggctattgactcagcaactggactagaggaaaaggtcatttgtgaaccttgatcagagaacacactagctggtcaggcctgaagtttataataagaactagcatgtgaacaaatttctattactaccaaaccagagtatgttaggcacggtctctgagtgcaggctggtaggagcagtgtcccagcagtcagtgtggtcatgaagctctgacttttgttagaattctaacctttaactttatatggactttatcctaattatttaacttaagctagggtccagagacagaaatacaataaagagcaagcatcagctggagtttcaggcatttgttactaacttagaagtgggtattgtggtcaagtaattattattgtcatagagaagatatactctagggccattacatagtagagaatcatgctgctatgatgagtagtccaattggccatagatgcgatgggaagattggttgatgaaagttctcaggaagaacatctccagcggaggatgcaatacagatgaaaccagcagcaaactaaaggcagtagcagtttaccaataatttattaaatgttgtaccttatgcttcaaagaaataataacccaaagaatgcactagtttattggaacaatccaacaaaatgggggaattctattgttcttcatcttcaagttgagagactgagtattaggaaggttttgtatgatcattgtttatacaatgtttcgaacatgagctcatagtcaaaacacaaatggtattcccagccatggtgtagtactccacagagttgtgacaagttagttttcaaatcttccttatgacatgaacaggggagtttcagaaatggatgagaatgtgaatcatggtcagggattattagaaagagacatatatacattactaaatgagaaaaaattcagtggatatataaagaaatgggaagaatatttgcaactgagtatagtcagtagaccaatgctggaggaagcaaaatgggtaggtaggtgagattattctggtggatctagaagttcttattttgccagtggtatttgatataagaatgttcacatgactattaaaactgaaagcctggcatcagaggatgtgttaagaagtggatggatggcgaaagagtagtacacaggtcttctagcatcctaataatggatgtacaggagacaggagcctctaagagaaatagtatttctttttgtttttctttagaccaaactctttcagaagctccctgctttcacactagtgttttaggagtagatctgagtctggtgagcaggtatggagtttgcagattcttgtgcatcttcacaattaattgtactaagacttggaaagatacaggagaggaaatagactatgaagagggaaaaacagagaagcctgaaggtgtgctctgctcctatctgggctgaggcctggctccaagagaactgcaaaggagattggaacaggctctacagtaacctgttataggtttttatcattgtacccatctcctttgagtacctgcgagacaggctttgaagagcatgctctgttgactgactgtatctcaggtagactgagagctgctatagtcactctgcagagaacatcctgcatacatgcaaccccagaacctccccccccccccaactaaagtttcagttctctagatctgatagggaaataatacagattttatatgtgaattatttagaattttgtgtttagtctcaggacttaatgtgctgcctggaggaattttgtgtttagtcttaggacttaatgtcctgtgctgcctggaggaattagaaagtctatcattgttgtcaaggggatagtttagggtttgtatgtaatctgcttttctacactagcatcaagattccaaatgtcaccagtgaggttggattaattattccttctgagtgatgatttcatttatgtcataaaacggcttcctcatcctagaaagatacttttaatcaagaagtgacatagtgtagaagagtgaactttatactctcaagaactatagttggggaaaaagccagatctgaaatccatttctcctctttgatacatgttgttgttagtggtgatggtgatactggtggggccggggattgtttctctctctctctccctctccctctctctctctctctctctctttctctctctctctctctctgtgtatgtgtgtgtgtgtgttatgataaccttggctcttgttccacatctattgttctgctttgtttttgttgttgttatagcaagtttatccaccagcctagaacctgccaagtagactaggtttcctgcccaatgagatccaggaagctgcctatttattttattgcaaataggcccttattttagagtgtgtgttctgtgttttataccaggtctaggaatggaacctaggctctcatgctttcagggtaagcactgtactgacgaagccatcatataccccatctcctgtggtttcccttctgctaacatttgtctacactcattcaattagaataataaaagctgctggagcacaagatggaaaatctgaaacaatgtcagaagagggaatggaaaggtgctttggactgatatgtaacagtaggcagttttggagaggagtatgagtcccaggctctgaaatatgtgccttcctgcttttcataacatattggagtagtgccctcagattccttctctatgcctgccatctccaagtattttctggtccaagaagatagtagaggaaaatatggtaacaggaagaagcctgttgctatttcataagtctactctctggagagaatggaatctgatcttctaggatgaatagagaaaaaaagcaaaataaacaaagaaacaaaaaagcacccccctccccaataaaaccacaacaaccacaacatctttaagtccttgaattagagaatcacagtgagtattttatggaatatcaaagctgttggatgaaccttgatggcctgttttgcttaatgttcttctaaggggtgtctctacggaaatctcccaaatgagttttcacaaaacatatatcttagttatgtttcctattgctatggtagaacacaccagcaaatgcagcttaagagagaatatgtttattttgaatgaaagacctagggagatacagttcatggggttggaaactgtagacctagggggatacagttcatgagggtagagactatagacctagggggatgcagttcatgagtgtggagactggagctggcagaaggagaccaggtggtcacactacagtagttgtcaggaagcagagtgagcttgaagtggattctgaagaatgaccccagagacctacttattccagcaagtccccacatccaaaaggcaccacagtcttcacaaacagcatcacttcatgaaactaagaggggtcatttagtgtctaaaccacaatatattgttagtcaagattttacttatgagtgagtccatataatatgggccttcttcaccacagtatgatcaattcatatgcatttaataacaccatttatagtttttatctcttatgtgattacagcttggatatgcagtgttaagtaatatttttgttttgtttttgtctttgttttttgcatttcattctaggatttgtacatagtgttagctagaaaaggtcacagtaatgtttcagctcctcagttggaaatttgccttgttttttttttttaaagcattaactccaaaacacacaaaaaaattaggcataagaaatatgaactaactattagacagatggaattagaagtctgtatctatttcctatgtatacatgttacataaaatatgtactttactttcatttctgtgactttgataaaaatatcctcatgtaaaggaactaagggggaaaattatcatgttttaaaatttcaggttacagttgatcactgcaaagaagtcaaggcaggatgtctagctagtctagccagtcacatcaaagcaacagtcaagagcagatgaatgagtgtaggtggggctgctcctatggtagctttctctacttttataaatatactgcttgtaaaaaacaggaagaagtcccacccacttccaggtttgtttcttctacatcaaataaggtagtcatgacaatcctccacagatcaactgatataagcaatccctgtctgagatgctctgtaaaataacacagactgtggtttgtttctgttttttgttttgttttgttttgcttatgctgggttttttttaattcttgcattttgttatactcaaaaaattgttgaataaaaaccactttttcgaaagttatgcttactcatttcattcttttatatgtctctaattgttttatacttactgtcactgaggcaaaatatcacaaacatcttagcagagatcatataggtgggctgttgattgtggggaaaatcagagtggtaggaactggaagtactagtcaaatcatagcacctccaaactgaagagcaaggagaaatcaattaacacgtacatggattctacttagcttcctcctgtcactcatataaagacccaaaccaaatctagatgatgctgtagacagtgggctacatcattcaaaattaaccagtgtaactatcaaagtctctatggacatgtccacaggacaaccttatctatcatcccattgagtctcactgccaagtgactctagatgaacaactaaaacaagtcatcacaatatgatacatatatttccctgtttgataatcaagagtgtttaatggtattctaaaactactttaccacctgggagcaaacttgaccatgcaggtagaactgaatattaattaggattcatcatattgattttaagtgttttaattctgttccctaattaggagatagacaacttatatattacatattcattatccaaactcccataggaaattaattttattggacatactttatgaagaagtccgatgtaattggaatactcttaattaattaaaagaatcacatgaacaagataaacaggcttttgtttcttagagtcagtgttgtgggatactgctacaagggaacaatttttttcctcctacagccctgggctcactgggtggagctctgtgaatagagctgaggaagagacattaaggatgaaataatcatgtttcctggcaccctagaaatacttttcttctgacaaatgtctacctattgaattacacctggtactcaacaaaataataaaacttaatgatcaaatgtttgagtgttctagttatctctgagacttgctcttataaagtcaactctgaaggccttttgagcatgggcagtgtaagagtgagaccagtcaggctagcacactgtgaattacagcttccagcagtataagggacctactcacaaggattctcattctagttcaggaagactatgaagaactccttaaacccaagagtttacctactattcagatcagtgtagcatgaaatgtgtgtttatcttaaagtccattcatttcatacatttctcttaaatataacaaattcactggaagacaaacccagtcatatgtttggataccatgggtaggtatcccaagaggccagaagaagatttccagtgtccctggagttacagaatgtaactcaggtgctcttggcagcaagcactcccaactcttcatctttccagtccccaactctttgataatttaaaaatacccatttattgtaaatcacatcaaagataactgactctattccacacagataggctcatgccatcaatgggaagaagttgtgaattttgttgctagtggtggatgaaatacacacccaacatcaccaccaccaccaccaccaccaccaccaccaccaccaccaccaccatccccagcaaatgactcctcttaaccacctcatacttctttaaaaatctcacctccctgttgtgttcgagaccttgtacagggtctagagcactcaatcaccatttcttttatgttgaagtaagaaataacccttacaaggaaactagggaaaagcaactcaatggtttgtgtttatgaccccacaagtgctagatgatgacacacactcaccatccctaacagtaatcatccaaagaattaaagccaaactaggatggttgccacaaagtctatttttagctgctaataattatatgttagccgactggtattttctacaaaagggaagatgacgtttctgtggataaagcatgccatggctccagctgcatctctgtggcactacatgcccccttcaaatctctgcagaaggagttaattatatgctgctcttctcctctctttctcatcatcctgtcctttccctccattctatgtcaataggtgttaagccgtttctttaaccttccctgttatttccttaaacacttgattgaatgttgagtgagatgatatgtccctgtacatatcaaatttatgttatacctgagatgaccaccttacacagaggagctttgagtaattaaacaattaatagctacctattgaagttccatatatgtaactatctggcctaatgtttaatttgatgtattgaaaacacaagaaatgaactaacaatgtttcgtttcttttcttttcttttttttttttcaaatgaatttgtggaaaggaccagaggaatggcggggatgaaaatgggaggaagtcaaaagatctctgaaaataacaacttatattttctttcaatgatattaaatatgttctagtgaaacaaacaaatataacctttgtgtggtgccagggtatgcattgctctaatgaccaggggcatggattctctctgtgaacatgtataaaccaagaaaatgctattcatgtttcattttcttatctgtatagtagacatatactcttgaaaatcattagggaactttctggaaaggaatatttgatgacagaaaaatgccttgatttttcttctcttcttaaatgagaaataaactccagtcttcacattttcatgacattttatttatctatttatttatttatttatttattacttatttattttaactatgtgtgtgtgtttgtgtgtaagtacatatgtgtgtgttggaggcatgtcaacatgcaatttcaaagttgaccacatagggaagatagggtgatagatacccggatgttagtgttacacacaattgtgagccactctatatgggagatgggaaccagactcaagtcttctgcaacagcagcatgcactcttaactattgaatcatctacccagccccttgattccactttagatagttttgttctcttgactttaaaacctggaatgactggcagtcatcaaacacatcaaaaacctaaattttgggaactttgaactttataaggtacaatgcattttatttttggtaaataatttgttttttagaaagtctttttggtatcataacacaatgttcccaaaaagagagctgagaaggtggctcatgggtaaggacacttgctgtgcaaatataaacctgtgtaggaaagctcagcagccatgtaaaaagctgggtaggaactcaagagcccctcaacccagtgtagcttccagtaaagacaggagtgccactagggatttctgcctaccattctaagtctatatttaatgagagaatctgactcaatgaaataagacatacagtgatagtggagcataccacatactctgtatctgtagcctctgcacatagtacacacacacacacacacacacacacacacacacacacacacacacacactttgtataaaagaatgccagtttaactgttgtgaatctttgagctatactttagtatttttattttttcagtttttcattttaatatttcacctataaaatgtgtgttttattaaagcaagtacaaaatagttcttgagaataacagaagatatgaattatatagaatagtttcaagacatatttgtaatggtaatcttactgtgtttaattctattcagaattctttctggaatatttaggaaactctactatgtaacaagctagtttatatttagactatatttaacgtattttgtttattttgcttggaatttcaatgatcataacttaatctaaatgactccaaatctacacatggatacatatacacacaaaatgcattttttgcatagactcatttttttaacagttctattcagcatttcatagagtgtttgggaatgctctgaaagcaaaccaccttaggaagatcttttaaaaaaacaatccattactttctttgaaaatatgtgttatgcttacaaaagttatgctgttttttttcttgttgtgagtaactaggcattgttgtgattcatgtatggaacttttatatgctatctattcctcttctgtctctcagtggtatagataaataaggtagaggaaagccaaagccctttcataattacaaacaaaactgttagtaatggtacaacattggaaagacaggattgaacttgactattctgatgataggctacaaattgagaccatctgttgtgctatagaacttcagtccttgtgggtaggactacaccaagtatttttaagtatttggcatttgaattgctgtagaaaatacctgtcagagaatgtggagaaaagatatagaattgtctgaaccattgtgcatttttagatgtatgtgctttaccttccccattgctgtgataaaatatctgacaaaaaccgtctgtgttagctacttttctattgctatgataaaacacaatgaccaaagcaacttacataagaaaagtaactgtatgaggcttttaataagagggttagaatccatgaacatatagcatgggaaatttcaggtaaaagacaggcatggtgtccaggcagtggtggagtccttacatcttatctacaagcaggaggcagagagagggagattcaaaatgatctgagtcctttgaaactccaaagcacccccacacccagcccagtgacaaacctccttcaacaaggtcatactttctaatccttcccaaacaatttgaccctctagtgaccaagtagtttaatatatgagcctactggggagctgttatcattcaaacaaaggcagcaatctagaaagaaagggaatatttggcttataagggttgatttcattatggcagggaaagatggtgttaggagtgtgagtcatctggtcacactgcacatgaaatcaggaagtagagatgaatactcctgctcaagttactttctctgttggggtcccagctcatggaatgactccacctatatttagggtgtgtcttcctatctcaatgaacccgatctagagatagccattcacagacatgttcacatgattgtctccaaggtttttctatttataaataatattaactgttacactggggaaaaggagagggatcagtaggaaccattattttctccaatgcatagacatgaaaggaagaccattctctcttttgaattggacaaattcaacaggctgagcagtcctagatctgatctgccatggatagttgctaagagcaagcaggttatgaactgggaaagaagcataaatggatatgaggatgaagtattagttagctgggcaaaaagcatggatgggattgactaagaatgtagaaaaaaacagtattgggatatatggtcaaaggaaagagcatctatgtagggtcacagttgggaagcacagtggagaattctaagacatgaaataattctttgttagtagagaataggcattgaatttgttagatacaggggcagggactatgaacaggttagaaaattatttaaaatgaattatggattattttattacatagatacagacttttattctaaaagacataaagaatgccactgtattcaagtgataagtgacttccatttataaagctgtaacttgagactcttagaggctttgaaatttggcatctcttcagtcaaagggtcacagtgggctcacagacattttaaatgtgaatgaaggtctctaaagaagaaaaaaatcacttgtttctactatattcctccttaaaatattagcaaagagacatatagaacacaggttattattctttgggtactctttaaagaatgtggaagataatatccttttgctaaattaaaaaacatatctatatttataggctcacatgtgtgacttaaacctacacacaaaaaaagggcaggggaaaaaagcctactaaatattgtacttctaaatcattcatgaaatggatagataaaaggaattaaaaacatttgtcctggcatgtacaatttccattataagatcaaattggtgagttaaatccactatcaacattgtttctaggaagtacaattctttttcctgaataaaaaggttgtgatatgaaggggcctaagcaaacttttttttttaaagtaacctccctgccatttgctcttggtaataatttatgtcacatccccaattatttttttccatttaaatatatttataaaaatatatttaaatattttgtgacaaattagtagatgtctttttttttaatttagtatactctttggatattataagtgttgatagttaaggtgctctggttgtggctcagtgggtaaagcatctgccaggcaaacatgagaaaatgagtttgatctcttaatctcacttaaaaaagacagatgggtggtacatatttgttttgttttgttagacattgagagagaatcttattgtgtagcactatttggaactcacttgaagactgactggctcataaaaatctacctgcctgtgcctgtgcctgtgcctgtgcctgtgcctgtgcctgtgcctgtgcctgtgcctgtgcctgtgcctgtacctgtgcctgtgcctgtgcctctgcctgtgcctgtgcctgtgcctgtgcctgtgcctctgcctctgcctctgcctctgcctctgcctgtgcctgtgcctgtgcctgtgcctgtgcctgtgcctgtgcctctgcctctgcctctgcctgtgcctgtgcctctgcctgtgcctgtgcctgtgcctgtgcctctgcctctgcctctgcctctgcctctgcctctgcctctgcctctgcctctgcctctgcctctgcctctgcctctgcctctgcctctgcctctgcctctgcctctgcctctgcctctgcctctgcctctgcctctgcctctgcctctgcctctctgtgcctctgcctctgcctctgcctctgcctccagtgttgttatgaaaggtgtggctgcttccacttgtaaccttggccctgggaaaacaggggacatggatcctgggtctattagcctgccatgctatttttctttttttctttttcttttttttttaattgggtatttatttcatttacatttccaatgctatcccaaaagttccccacatgctcccccacccaatcccctagccacccactcccactttttgaccctagcgttcccctgtactgaggcatataaagtttgcatgaccaatgggcttctctttcaaatgatggccaactaggccatcttctgattcatatgcagctagagacacgaggtctggggcgggggagggggggagtattggttatttcatattgttgttccacctataggattgcagattccttcagctccttgggtacattctctagctcctccattgggggccctgtgatccatccaatagctgactgtgagcatccacttctgtgttttccaggccccagcatagtctcataagagacagccatatttggatcctttcagcaaaatcttgctagtgtatgcaatggtgtcagcgtttggacactgattatgggatggatccctggatatgccagtctctagatggtccatcctttcatctcagctccaaactttgtctttgtaactccttcatgggtgattgttcccaattctaagaaggggcaaagtgtccacacttttgccttcgttcttcttgagttttatgcgtttagcaaattgtatcttatatcttgggtattctaaatttctgggctaatatccacttatcagtgagtacatactgtgtgagttcttttgtgattgggttacctcactcaggatgatgccctccaggtccatccatttgcctaggaatttcataaattcattctttttaatagctgagtattactccattgtgtaaatgtaccacattttctgtattcactcctctgttgagggtcatctgggttctttccagcttctggctattataaataaggctgctatgaacatagtagagcgtgtgtccttcttactggttggaacatcgtctggatatatgcccaagagaggtatcgtgggatcctccagtagtactatgttcaattttctgaggaaccgccagactgatttccagagtggttgtacaagcttgcaatcccaccaacaatgggggagtgttcctctttctccacatccttgccagcatctgctgtcacctgaatttttgatcttagccattctgactggtgtgggatggaatctcatggttgttttgatttgcatttccctgatgattaaggatgctgaacattttttcaggtgcttctcagccattcggtattcttcaggtgagaattctttgtttagctctgagccccatttttaatgggattatttgattttctggagtccaccttcttgagttctttatatatattgtatattagtcccctatctgatttagggtaggtaaagatactttcccaatctgttcgtggcctttttgtcttattgacggtgtcttttgccttccaattttatgaggtcctatttgtcgttagtgtttccgccctatgaggtatacaccatcaaaaaagaaaaaaagaaaaagaaaaaaatataggttgataaatagataggtagatagatagatagatagatagatagatagatagatagatagatgatagatagatagaatataactgaagcatagaggtttcttatttcattttaaacagctcctataccatttaatcacagttccttacaaatccaaaaatatttctgatcttctaaactagacttttgccattgtaacctaccccactaaagcatggtaatttctttataaatattcttttagatttttctatattgagaatatttttattacatattatatagatagtataggtttctcttcctcttctcctcctggtgcctcaccatctgctttcacatctggattccaccctttctatttctcattagtaaacaaacatacttttgaaggattataatataaatataataaaagttaaaaaaaacacattggaattgaaaatacaaacagaagggaaaagcccaagaaaagaaaagactcactcttttgcatattcagaaatcacatagaaactataaactggaactgcagaaaacctggtacagacgctgtgcatatcaactctgccagtttctacatgccaattgtgcttggttttatagctcaatttaaagggcccttagtttcttttcagctttccatagatagagagatttttcaaatagacacatagttttattaacttattgagaaatttatacattcatatgatctattttgatcatacacactgccccatgtgtgtccttctaactccccaaatatactttcccacctattcttagctttttctcccccctgtaacctactatgtctattttctgttatttagtggagtgtgttttgcctgttaggggccacacccttaaagaaaattgatattttccaacctccacacaaagccatcaactcatataactcctcagttaggtgtggaaggttgcatgtgtgtctctttgtcttcagtgcttggatgtttaccaacatgttcttgcatagattttgtacagcaacctcagctgctgtgagtttatgagtgcagcagtcctaccgtgtcctggagaattactcattgttttctattgtgttcctatatctccattatcttctaatccatgatgatgtgagtgatgttatgtttgcatgtattgtttattattataatactgagcagtgtgcatcctacactcatccagtgtgaatttctgaatagagaaataggcatctctgatcctttattttgctaatattttaaaataaacaaatgattacatatgcttgtaaaattatatgtctgtgcatgaatgtgcatgcattgcacagtgtggagaccagaattaattttcaggagctggctatctgatttaaacatacaagtcccagggattcaactcagggtgtcaggcttgtggcaagtgcccttaccccactgaacttgtgtcaacttttcattgctactttaattggtctgattggctcaggccttgaagctgctatgagcctatatagtcctgagttcttcattgagtgttttggatgtccttgctttacattgcattctagtattagaattgctcttatgcattacttcatgaatttttaagaccatgttgactaatgaagatggttagtatattgtcatagagccactgtgcttatgtatcaataaagacaaaataaattgaagagatttttttcaatcctcctctggtcaatgggaatgtgagaaaactgtcaagacttcattagaataaaggtactccaatgttgttaaatgagcaataaaaatttaaaaaatcagtgctgtaaatgaaaatgtcagcaatctattaatctataactccaacttataactccaaatctagaatttctgatgcccttttctggcctttgcagtcacatgcactcatgaagtcatacccctatacaaatacacataaatacataattttaaaaatgcttatatgtaagacatgcctaagattttctgatatgtgccttttgtagaggaattttaatcccataacatggctgctctggcaagagaccatatctaaagatcttatagttctgtgtggtcagactggagtgcagatacagcacacacttttaatacatctaactggaatatagatgcaactttagtacacacctttaattcttaaaattgttttatagaaggaggcagccaagttagaaagagaaatgtgattgaagggcagaaaatgtgatgaattagaaagatttgacagaatgagttagagacattatttttgagatttggtctgttgctgtgtgttggaatactgaatactgtcccccatgttctgattgcctcagggacaaagaaatcttcatatacaagtgatgctatggaatgttgctccttaatttaaaactgttgctcgaataaaaatgcttatagcctatagctgggcagaagagaaaagggtagagcttcagttctggggcttggaaactgaggcagagactaagaggaagagaaatatgagagaaaggggataggtaagagaggaagacaccatgaggtaagatatggtgagaactggccatgaggactgttcagtctgagtaagagatgcccaagcagaaaatggttaagtcatatctcagggttactgatagataggagaatagacaaaatagcttagagggttgaaatctgcccaactttagtgctattaaggcttgttatacatatacaggttttatgtcttttatctgggaactaaactgttaaagacagagtagaaacccccagttaatttttactacaacccaggatacattcaattttcacaagataagacaggaaagagaagtttgaagagagcagctcagagaaggatggagtgtgagagggagataaaagggaagggaagggagatatagggagagaggagaagggagagggagagaaagaggaagaggaaggaggaggcagatttcctagcatagtgtgatagagacagggtttgggtgaagacagagggagccagagaatgaggaggagctggaagattagggcatattgccaaagttagtaagagcccatgcagaacagaccagtcaaacctgagagaagccagttggatcagtcagtgcagagaggggttcttagtgtatgagatatatttccatgtgtttgcatatatatatgcatgtataaatatatatgcaggtgtttgagtatacatatgaacatactaatatgaatgttgggcatcactctggatgactctttcagcttactctctgaggcaggcaaatctagacatttcccatgtggttaatttcactagccagtttgcatgcctacccaccatataaatggtttgtatggatctgaacaccagacttaatgattgttcagcatatactttaaccaccaaggtgtctctccagctcatatatttccttaaaatcgaaactgccatctggcttctgcctttggagcattgatatgtcacatgaacaaaagcccttggtcattatctcttcattgttgattactcattgtttttgcatagtcagttaatgtgagaaaaataaacacgtaagacaaaaacacgcaatgtcaatagctccctctacatttgctttgactgtcccaatgtatgccctaagtttaaagagcaataaaaggctgctgtttccacagccattagctctggttgcaactgccagtcatgcatagaggtcagaactcttatcactgcaagatcacttccagctactatggtcatttatcaacagggacaaaatgaactcagcagactgccaagattctaaatttcaaatacagtgtatgaaaactctcaccacttcagcagagaagaggtttgctggagagatgatccagcaattaagaggagttgctaatttttccagaggagtggatatttgctcccagaatttcattcccaacacctaagcagggcagctcacagctgtctgtcactccagatctagggacccaggcattcttctgaccctcattggcttctgcacatgcatgggacttgtcagtgtaggccaacatttggccagccaatggaattatttcaacaggatattgcctgatatacctataaggtcaacaagtaaaagaaaaataagtttatcatatttgagtttctaattgggttgtgtaactttaaaataattttcactgaactaagtttctttagttagtaggctcattgtggaaaaataaattgaaagacgatatttttgtctttgcatatactagatcctataggtttattttagctcaaacttgcattgactatatagtttgtattttgtgtgtacatataacatataatataaagtatgatttatgagattgacatatattatttaggctgggtagtctaacaacagctggggtccctgagaaaggccaatctgtcctggagggttgctggggatatggttttcctcaatccacatttaaggccaaagaatcttctaatgtccataaaggacagtggcatcattaccaggacagacacacttaccaacaaaacacaaaatcagccagggaagtaatatggcttttttcattcatcctaggtcctgatacttattggaaggtggcatccacactgagagaggtcttctgtcctttgtcagtcattctgggaaatgtgctcacatttcccacccagacacaagcttttagttcatttatttgacagtcaggaataagtatcacactacaagaagttaaaaaacatgggttttaaaaatgtccaccaaagcagaattcggaaaactagattcatgttgttttctcctagtgaataaaaacatctgcagagtatccttcatcagccataaagactggcaatgtcttcactgggactcacattcagcatctagcttagagtctttctagtagcattccatgttatctctcttgtgtgtcttgccaggcatttttgattatttaaaacaactaatcactactttgagctaggctgttcaggattagtggtcttgtagaagctgtcatgtgtatttactctcaagcacactgtttcataatttaaaacctgcttatggtcctgtgtctgacccaaccatgatttattccatagtacattgatggattctcactgagaattgatctgccgtcactcagaacagatgtcaatgaccattgtctaaatttgctgtgcttcagagcaggtgtaccttgcctagaatgtagcttcttacacgtagtagtgtgaattgccaacctgacagaagctgaaatcatctgggaaagatgatacctgtgaaggattatctggatcaggttaattgagatagggaaacgcaccaaccctggcagagatcctggtctgtacagaatggagaaaagcaagtgagcagcagtctgtagtcatggaccctctgggtgcgatgtgagcagttcccattatggcttccccaccatgactgtgaatcaaaaggaatacctattttttttccttaagttgattctttcagagtagtcatcacagcaataaaaaaggaaagaaagaaagaaagagagagagagagagagagagagagagagagagagagagagagagagaaagaaagaaagaaagaaagaaagaaagaaagaaagaaagaaagaaagaaagaaagaagaaagaaaacccaacatcacacaaataatttcatgatctagtcatgaacttattcctctttgtttagagggacttttgaatgtgtttccttggacttttttattttataagaagttttctttcttggttatgtgaggcttccctagtaagtagtgcttaagatattggaatatctcttaccacataaatgtgtgatagaattcattacaacttatatgatttattaaatggagtcacccctgaagcaaatgcattattaagtagttaaaaaattcatgacgtgtccttaacacagtgagaatgccttggaggcactcatccatcccataaatatgtgtttaacaaaattgttgaaatgaatctcttcatttgctcttatttaagacttagatatatagcataaataacagaatgcacttctgacataaggttttagcttgctgttgaatgcaaattgccacagctttgtctttgttggtacataataaaacaagttctccttgattaaaagtcctcagtgggctgtgatagcatagaatacattcaatatgtggttcatagttaacatcctgcttggaatttattccagatccatgctttatagcatatgtattgtaatgattaatattagttatcaaacatgtttggatctggtagcaattaatagacttgtctttgagtgggttggtaaagacatttgcaggaatcgctaatgatgttaagaacactggaatgggcacagtgtatacttcaggtataaagtctaaggaaaaagttgtgttcttcctcatctaccatcaggtcttcctagtgagtgaacctgttgcatcactgctgctgctgctgttgcttctgccttttgctcccaaagtaatctagcttttttaacctttccacagtcttaagacaagcagatttccagaaacccctcatatctttagtatcaagctgagactactgagacatccagccttgtgtactgagtggttgcttactgtgttttaagtttctgcagtgtactggtaaccacctttagaacaccagtttgtaatgggtaagcctgtccaataaattatcctttaatataatgcataatatcagctcactggaatttagaataatgttagtattggaaatcttgtttgacttctaattgtgcatgctgatattacaggagggtttgccactgtggtcagttagctcagtagaagcattgcagagtctgtgatatattaaacttgatggttctatctttttagcctagacagatggatagcactgatggatagagtcatctgtctatgttactcactttcatgtacacaaatgcacacatgtacacaaatacacacaaatatatatacatgcatagtcagacaaacatatctcatggagaaattgaagtattaaatatttatttagaaggaaaggtgagagcatatgattaacataaaaaatgaaataatgtgtgccgtgtgattaaaaagtaaaatgacaaacataaatctatctttcctaacactctaataagaaagtcagagttgacagaatggattaaaaactagagcttatgatgttgcaattggaaatgcgattcacttggattggaagataggtatagaaagctacaacttctacatttatatcaatagaactatactttgtttcttgcttgcatgtgtatacaaaacatatgtgtgcatatttttatgtgtggggatacatgagtctaaacatgtgcatgtatgtgcatgtgtatgcataatgagatgaaaggctgatgtttgtgtcctggagctctgaaattatgagagttccccaaacctgactagttttcccatgggctactggggagttagatcctagtcttcagtnnnnnnnnnnnnnnnnnnnnnnnnnnnnnnnnnnnnnnnnnnnnnnnnnnnnnnnnnnnnnnnnnnnnnnnnnnnnnnnnnnnnnnnnnnnnnnnnnnnnnnnnnnnnnnnnnnnnnnnnnnnnnnnnnnnnatttatttccccagtttctcaaaatacactgtgaatcaggatatggctagttataaaattactcttgtaataaaatacagtcaatatataaaaaaattgcaaccatcatgaatgtatccaactgtagagcttttagatttattaaccactaggatccctttagatacatatgtatgcaggctctatgcatgctgacaccttctctgggaattcatatatgcatcagccatactgtttagaaggccttgtttctttggtggcctccatcccttctggctcttacaatacttttatctcctctgcagcacaatgttccctgagacttaagggggactagagacaccccatttactactgagtatttcaaagtttctgggtctctctctctctcatatatatatacatacatacatacatatatagttggtaagtaagacactgatctatggtatcatagggtttttattgctgcaaagagacaccatgaccaaggcaactcttataaagaacagcataaaggacaacatttaattggggctgacttacagattcagaggctgagtccattatcatcaaggcaggaagcatgcagtatctaggcagacatggggatgtaactgccaagagttctacatcttgatctgaaatcaagcaggagaagaatgtctcccaagtatctaagaagagggtatcaaagtccatcaacacagtgacacacttcttcaaacaaggccacaattcctaatagtgctactccctgggccaaacatattcaatggatacaacaaagtgtcattgggattattttattgttatattcttttagcacattggttctcaaccttcctaatgacacaactctttaataccattcttcatgttatgatgattcctaaccataaatttattgtcattgctactttataactaattttgctattgttatgtaaatatcttatatataaggcttctgatatgcaacacatatgaaagggtcattaagccaacaaagttaagggtaattgttttatagtctccagttcttggccatccacccaggcagtgtagggtatgggttccttatgcatgcttctgtgctgaagcaggagaaaatctcatggagtgggccatttatcagtcagatatggcttggtcaaccccacaagctttatgctatgattgcactaacatttcttggaagcaggttagcattgcagatcaaagcatctgtaattgggttagtatttccaaagtgcttttcaatattatgaacactagtcagtacgggtgaagttattaggcagagactatcttgatttcaccatattcagttagttctatagttattgtctttagcaataaatccttatcatcagtttgtagagagcaatagcctgggttgtttgggggtctctatcaagtctttttggctaacaactctattagatgtaacctagtcctgaaactggaaacttcatgtctttacaagcattgtccagtcagaaaccggtctcccctgctacttagcaataccatttagatcacctttttgaatgcatatattctaggaagtttctactgtattaggtttcccctgaggagaggtagacacaagccaatacccctaatccaggagccatctccaatgaataactactcatatatgaaaaaaaaaaaaatggttttctccaatgcagtatcactgggtatacaatgcaagccactctctcttttttttttaatattttttattacatattttcctcaattacatttccaatgctatcccaaaagtcccccataccctccccccaattccctacccacccattcccatttttttggccctggcgttcccctgtactggggcatatacaatttgcgtgtccaatgggcctctctttccagtgatgtccgactaggccatcttttgatacatatgcagctagagtcaagagctccggggtactggttagttcataatgttgttccacctatagggttgcagatccctttagctccttgggtgctttctctagctcctccattgggagccctgtgatccatccaatagctgactgtgagcatccacttctgtgtttgctaggcgccggcctagtctcataagagacagctacatctgggtaaggccagatctctcacccagcagtagatggccaacacaaaaccagcttgatggcatgtttgcaggcttttgtttttgtttgtttgtttgtttgtttgtttgtttgtttttgacttgtaggtcagttgtatatatactacagtttccagggttttttgctattatcagatttctgtatgagagaatgtgggtctctctacctcaatgtgttccttaaagtttttctttggattattttctgctttttttttattttgtcaaattttatttattattattattttacatgtctgtttgcataataataaggcagagaataaaagtgtgagtttggttggatgggaaatcagagaaaatctgtgagaagttggatgagggtaaaacatagaatatacttttaaaaaatataatttttaatttaaaaagtttcatttagcaaacatctgtcagtacggaaaagtagagatgttttaacaattgtaattgagatttttaatattgtctttcctataattgttaaaacaagaatactccatgcaagcgaagatgaagaaactttggaaaaaatattggaaccatctcaaagaaacactgtatttgagacagtaactatagtgtcaatatattttgaagggcaggagtcctgaggaatacctttgctggacccagcagaattggagcagtatcacaagtagctatttggtaaaccttgataatttgaaaactaagccataaatttccaagtccattgtcaacgatcattgtagaagagagggcagaaggactataaaagctagaggaagagggattttgctgatagagtatgtctcctaaaaatgtcagaaaaactacaccaatgaagtcttaacaacctgcctgtgtaaacagacccgaacaaggatgaacatgctaatgtgaatgaaggaggaaatctcaggagacctcaacccaaacaaagcatgagggagaaatagttttccctttggaagaaaaaaaaaaacaattaccaagtgatcagtgctgaaaacatatacatgaaagtaatgtcatacagagttggttgtatttgtatgtatagacataccggtactataagtacaggtgtgtgtgtgtgtgtgtgtgtgtgtgtctgtgtgtctgtgtttgtgtgtgtatgttatacaacaacaattaatgaaccatgaatttgagtgatatcaagagaatgggatagtatgtgcgaaaggttggagggagaaaaaggaagtgggaaatgttgtactaatattatctaaaatataataaataaatatataaataaataaattttaaaagagaccagaatgagcaacataaacagtgaggttttatttttgaaaaaaaaaaaagggaaagttaataaaaatttgtaactatgcatcagtcattataaactgataaaatgaattaaaatatttttctaggaaaatataatgctggcaataaaggggacctattgtagatatttcattaatttaaaaataacactaaggttatattgtaatctagtataattaaaaaatgcaataaataggggaaattgatttatccaccaaaatacaaattatcagaatttcatttaaggaaaaaaaataaaatatggagactttaatgagatgattaaattagacagcaaacaacaattcaaagtgacatcacttcatgagatatgatctataaatggcaaagaaaataagatcaaatctatttcatttcctagtttgtgggcattccacagattttatatactttaacttctcctaagcaatttatttaatgattgtaaaaaggcagaagggcaacaagaagattactcagactatggaaatgtggaccctgtgcactgctaaatttcaaaaaggtgttttgtaattctatcaagtgcacaactagggctgaacaggtaggtaattcaaccaggaaagccaattccccacaggactgatgccctgaattacttctatggaatctacaagatgaaggttaggaatgactccagtaagttatccactgacctctacccaggcatatggcatatgcttacacgttctacacacacacacacacacacacacacacacacacacacacacacacacaacagtgtgataatttctatataagttgaaatttttcttcttacattatccagtatttgtaccctgatgtacttttcctagccctacaaaataaatgtacatacaaaaatttggacaagcttacagacctaatgttacttgtgagaactccaaaataggaaccaaactaaacaacatggtacatcatttagtgagatactcatattcaaccatatcagatactatgaatttaaaacactaactagggctaaagagatggctcagtggttgagagcatgtactgcttttgttcttacagaaagaaggacctgggttccaacctcaatacccacattgctagatgggtcagaagtgcttaccacttcagctctaagggacccaataacctcttctagctcctgaaatatagtattcatgtgcatatgtgtacatatgtgcatatgatttcaaacaaaatctttaatcaaaagaaatatgaagcaatgtggatggactcaagtctgatgcagcatgtaagaagtcacactcgatatgcttgatgagttaatctatgctgaatgtctttttaatagaaatgtataaagatcatagaagaaaaccagtgtttgcttgaggctacacgtaagagtggttttaaattaatgtcagagattatttggagtaatgggaggtttgtaagttgattgtgatactgagaatttagcttgatagatacaagtgcctgacatgtataccagaagccctggtttcaatcacaagcacagcataaaccacaagtggtcatacttggctataatcacaggacttggggatgtagaatcaggaggatcatcctcagcaacttaggtagtttgaggacaacctgatgtgtttcagatcttgtccaaagagaaagaaagagagagagagagagagagagagagagagagagagagagagagagaggagagagaggtattatgagattgtatggcttgcaatgcattttctctaagttctcaaaatctgcaaccaacagcttccattttacactacataaattattgctcaaagaagctgctgaaatatccttcttttagggtctgtgcaaacagtgatttagtgtaagaaaataagtcagacagccagaacttttctgcctgtcagtgctgagggttctcagcaccataagggcctcgatcttatttctccttgccttggctagcagtgccttggcttcccctcagtagactgaagtcactgagaagatagtggcagaggaaatcatggctgaagaaacacaggtacccaagaatgccaaccccatccatacagatggaaactggagcatgtgaggacagtactgaggaaactgtcagggcaggtggtggctgtcaatccctggtaaagccaccattgcaaatactgcaaggtgtgtgagatggatgacccatgtgtgtgtcaggatactaccagctgcctgctttcattgacaagattgataaggcatgcagtaatgacatcaagagctttaacttccccaagaaacttctttgttgtcaagtgaaccctggagggcaccaagaagagccacaagcatgaactggactacactggaccatgaaaatacatctactccatggattctgagcagacttaattccccttgaacacccatggctcaattctattctgatcgccttgtatgagagcagtggtgggcaacaatttcttcactgagaagcagacgatatgtgtgaggatccaagagaatgagaagcctctggagtctagagatcacccagtaaaacaactggcccatgactgagagaaatgccacaggtacatttcccaatctgtgggcagctttgtcagctggacctgtacccaattgatgggaacctgtcccacacaaagctgtctccatagcatggtccccttatacacatggattatggaccacaggcttcttcaagatgggtgacttagaaaagcacatttccctggacaaataggctgactgctttggcattaaggaacagggtttcaactaggatctggtgatctaacgaagttctcgccctttcctgcagttctggattttatctctctgatgtctccccttccattcctatgtttaaaatgttatggtttttggctattctgcctggggataagatgagaacatagatttaactgaatacattaactgtacaaaaggggggattataatccaagtcatgacattttcctcatgtaacttaactctgaggctgtggcctgtcaacagtcccactagtccccagtgtcttcctggctgtgttggaaatgcaatcttggcttatacaagcatgtagtatctttagcttttatctcttttgccacttgactctaacactcacccagtcataatgtgtggtttttttatatcatgatatagcctacatagttcagaggtaggaaaaaggaaattacagacatagacacaaaatttggacaaggatgctctgagatcttaagtacactagtaagaactggaaagcaagtcttggtagtttatggctgagtgaatatttcaaagctgtttatgtgctgccaacagcccagaacttcagtatctcctcactcataaggcagttgttttccacatttggctgttgggtaaaatttttgcaagccattgaattatggatggaccagaaactctattctctgactcaactgccctcagaattcagggctcttacaggcctctgggcactgggagcccatgtccagaaagtgaaagtcaagaggaagagaaagaaaactgtaaagtagagaaagtaaagatgatgaactggtatgaatttcactctagatagtggccataaagtttctaccatgtcctttccctacccccttaaatcttttactaatcaagagaaacttcaaagtcaatgggccagtcggatctcacaggctgaggatttgttcacctccaagcatttcatgaaaaagctcttctcattaatcacacagaatctcacagtgacatgaagagattgaaaaatctttcaaaacaaaaggtaatgacttagaaataaagtgaaaataagtcataatcatttatgtgtaaacaagcaaatttttaaaatatttatttttttcaacatgtttcagttgtcattttgtgcatgaatattattagaaatgttggccaattttccaaaatagctaacagatttatttaaagttatggcaagtctaagaaacagtgattatagaaagacatggtggtgtacatgctcatatcagtaattggtactctgaggcaggagaattgcttatgtgaatttaagggaatgttaaactaaacagcatagcaaatcaccatctcacacacacacacacacacacacacacacacacagagagagagagagagagagagagagagagagagagagagagagagagagagaaggaaacaaacaaaaggctcaaaaagtcaggttaatatttctaatataaaatttggcagcaagcaacattacatcctgagccatctcaccagcccacaaaacaatgacttattattagccacagttccaagctaacaaggaattatcccattctccagtcatattaattccttttagttaaatataaaaagaccataaggaggagatttagggacatacattcatacatacatgtatctccccccacacacacatatttaaaatcatttgtccatggatggatatgtgtggggtatatgttcatgtatatgtgggtgggtgcatgcatccaagtacaggcatgaactccggaggaggatatcacatatcttgttcattcattctctaacttatttcactgagatggactttcactgaacctggagtgaatctgtcagccagcaagccagccacagcaattctcttcttttttctttaattttcctagagttatatgcacatatagccatggccttctttaaataatggttgctagagatttaaactgggttccacatgctcctgccatacctgcatctaccctctgagctatttccctagcactctatataactaaaatataactaattagtgttaacattcaaggtgaaatctgaatatttttctactgagtttgtttttgatttctgtctcttatcttactttgaaatgcttgtgtttccaaatatttacatagtactcatttttatagttctataaaatttacacttgcttcaaaattataatagaatacagatattaaaattcagaggtcctgtgaaggcatttaggcaatagttatcttaaataactcttttgttaaaataaattaaatatcacaacaattttatactcaccattcattactattctgatagaaaactagattaatttgtttggcctgcacttcacaaattttctttgcttcattttgatttaattatatgtaaattgtgagattctcatgtggtacaaatctcagagtattacataaaaggaaaaatataagtggaaaattctattgtactccaatgtaagtaacagcttttcaaaattcagataacttggtaattaagggggaaaaaaattgtgtatcttaccatgacaaagcacatgaactgcatagaatttcagtagtgttttggatgatggaatgaaaaattgcattgtttgtatgatttgggatgtagtttaagaagaagtgatttgaaagagcttgggtacatacagtaaaagattccgtggttttggggtgggatttcatgtaaacaaaactgttggagaattcccttatatcctcttgcctctgtctttttcttgctggaattacatgcttgcaccattgtgccagatttatgcagtcatggaggacagactcaagatttcctgtgtgttagggaagagttccaccaggtgaattccctttccagttctgactacgcaattttaatgctaatgccttctatttggttgactatgcatatgaatactttatggagacttggaaatattgcagccttggatgtgtacctgaaagtgggacttgaaatgagaaaggagggggtgcaagagaaggatgaaattaagacaaagtttctgatcaaggctcaaagtttagtattcagcactgtgtttatatagggaaagcccacagaccccctcctttgtttcagctgagttgagttgcaaagcgagctcagcaggtgggtggtcatttcctcaaagcttctgtaggaaattgcaaatgcatggaggccagatgactccagctaggttgtaaagccatagtgggtttgtttagcctactcaaggcttggggaagggcacaaatccctcttttttatttttttaaaagatgaactggatagaggcacaagatttacttaccttccataatccagtccagactaaaggttgcccaggtgaccaggcctgtcttaggtcagtgtctatttgctcctttttacccaacagggagaacaagcatagctttttgatgtatgtctttggtcaataggagctcaagtatactcctacccatctctggttaccagcattctaaagcacactctttcccattcagaccaaagccatgaaggacatttgaatatggactcaatgcttttaacttccatagcgaataactgagcttgctgaaagtgatcctgtgtgaaggcaaccaatctatttagatgcaaggtccaaaagttaaaagcaacagaattataattaatggtccaagcactgtagaatttaaaggtgtaagccattgggaagtggagaaaaaggattctcaaaccatccatgcttctgtcctttttctcttttccttttggctagtacttcttgaactttagccatagaatcctttactattccagaatgatctatgtaaaaataacattctcatggagggctgtacatagtcctccctgacgaagggataaaatattaggagcttaaacacatacactagcacttgttcataatccagattctgtctaattttatcaaatgcaaatgtaacttcagaaagaattgcaactaacttccaagtacatctctgaaaatgttcagcaccagccttccaaatgaagactgtcattttctttttccaatattggattgatttctagaccagtctatgagagagtcagaataaaaggaacaatttcaagcaattttaaaccatgagctatatattgactatcagtatacaaactaaaagcttgaattttcaaattttcaaaaaacagaggctacagcacataatccaattatttgtgaagtaagagaagactcaagagaatgaacatgtgatccaatcacatatgtttctctccctttagatgagctgtttataaatacagtaaatgcattatttatcatctacatgcataaatttacaggaaatacaaaagtatgtatagaggcaaattctaacaacttgtcttgtggataataattatcaagtttgcctaaaaagtttgccatgcaataggccaatcagtattctccaaaaccaatttaattgctgtttggaataacgaataaacatttcattgggttcttaagatttcctttgtaaaatacttttgtgactatacaacagttctgtattaacacagcaacagcatcataatagggtgttaaaactttacttggagatgaagaaagatggatccgcattaatggtctcttttgcaaaagaactgctgtgagcacataagtagcaataacgcaaacagccaacaattgattatagtctataatttactgttgttggctcatagcttcctctatgttctgtaattctatttgcccctcatcagttaatttgcatcccccttgagaatgtcaagcagaggcttaagttctccagtggtgagcttaaggtgagatcttagccaattaacatctcctagaagcatttgaaaatcattaaaagcaaactatcatttcttattttaatttttgtgccacaatttgtttaggatataactgaggactgaaatattgaaaaaagatattgcctttgaatcatttctggaacaaaaattactccaaattttaaagcttgttgtataagaagagcaagggtttgtagtaaaaccccatcagagggataagctaataaaatgccatccatataaaaataatatacactgaaagattcaaatgccctaatttcttgtattgaagcagaaactttttttttttttttttttttttttttggcacaatgtagggctattggtcattccttgaggcaaaacattcaaatgatattttgttcatgggttctttaaaattacaagcaagctcactaaatgaaaaccctttataaccatcaggttataaaaacaatcgtccaaatccacaataattctatatgaattttttggaatggcaagtagagtaggcaagccaagctataatgccccccacaagttcctattttcattaacctttcataaatcttaagttggaactttaatttgtattaatggaataaccaatcccttggtggtgagagagtacataatttccagtgtcaattaatccttcaaaaccttttttcttcaattagcaatttaagtttacatctcttattagtaatagattggtccaggtacacatcagaggatccaaagccactttgtcctttcttactctttaccaagacaaaaggaatgccacaggagcctcagctgaggctgctctgagctttgcatgaactcaaatataaatgtttctttacccttcctgtagtaaggacagactccaagagaatgattctgctgcctgtctatgcctctattttttgaacagtctttcataaaactttatatgccccccacactaaaaacatttgttatctccttggcactgtgaaagcattgcttatactgtagtcccctgtattactcttgcagtcatctccagttgcttgattgtttcctaatacttcattaaatagacattattttaaattctattctttataagtctactttctaggataagaattacataaaatattatcccaatttagagacctgttttcctggattggcttacgatgtgtgttgtcatttaaaatgactccaaccctgggttaccagttttaagctaactttactttaccaatgttccaaattttaatagccaataacttaatatgccaatactctataaccaacacatgcagatcacatttatacctttaaaatcatcagaaacaaaaatgaaggggctatacacatcttgtatattcagaccaaacaaattttcttatcctttctagttgtaatttcaagagaatgcaccttgttaccgtctgaattcaataaacataattgcagagattttaaattaaatcaaggggtggatagctaacagatagttttaaccgttttttttcttatcaacatgaaacacagaacaacaatcattccaacaaagaaacaaacacagaaataaattgacagatatcaatagattggtgcatcaaggacagacaatagacagggaagagaacttgatgtcccaacgatacctaaatataaccagatatatctccagtagcacccagagatgatcaggacatctcctgctttcctcctgtcccaaggagagctctgaaatagcttatatcttttgctaatgtgtcctggggcaggggacaactgcttttctgaaacctattctctctcgctttcactctctttttcaggtttataattcctacttctgggcaccatggaccacatctgtgtttttaaaccctgctactctcacctgatgcagctcttggctgcagacaaatgcctatatagaattcccttgtcccagttgcactgccaaccctagttacattcagcgtcaggatagcacctattcagcctagctgtatcatttcttaatacactttctgcaacaagagcctccgaaaaataaaatttgtgcctagcactaaagttaatgctgttcattgcttaccattttgcaggatactattacttttcttctgttttctgtggagctccacctaaaacagtgtttctcagtgggtcactcccctacccccccaccccgcccgttttcagtccccttcttcgggtgcaacctgtagttgttcagtggccagaaaaccattgtgggtctgtttagcctattcaaggctgggagaagggcacactcaagaactaaactatcattttaggtttatctttgttttaattacttggggaactgggtgtgctattgcatgatagcaagtgatctctgattgtgcttccttgctcatgctcttttctctgaggagctgaatactcatcttcaatgagatttgtaggaaattcatgtcaggacatttctaactgctatctatatgagcaaattttctaggagagtgatgtttgcttgctggcagaactgaagacaaatcctgggaattcaaacatcattcattgcagtgtacatggcttaaatttgtaccacatggattacatttatcttttcttagttggaagatctcagttgtcactttcaaagctagctttactttctcacataagtatttttcttgttgttgttgttgttgttactttcattatttccactactattaaaagctaatagacaactgtggtggtttgaatatgcttggcccagggagtggcactattaagaggtgtggcctttttgatgtaggtttggccttgttcggggaagccatgagattcctcataaccacatgggagccattcttctagtggtcttcagatgaaattgtagtagtctcagttactataccatgccttcttggaagctgctatgcttctgtcctgatgataataaactgaaactctggaccaataagccagccccaactaagaagtgtcctaataagagttgccttggccacagtgtctgttcacagcagtaaaaacttaactaagataacaacatattagttttaagacttatattaaaggttcagacatatttacctctggatctgctttgagaatcctccaatcatagtgctttgttttagaaagaacaatgacacataacctggtgactcaaacctgttatactagtattaggtagggtgaagcaggaggatcttaagtaccagtacagtctgggttataatatgactatttatatcaaaagaaagaaacaaataaagagaggagagaatgtgtgggcatgaaaagaggaagggaggagggaaaggaaagggggaaaagaagaaaaatgccaggcaatgcaggaacatgtgtttattcatggcactggcagaggcaggccaacttctatgagattgaggctaacctgttctcaatataaattcccaggccagctaggaatagtgagaacctatcactttccagaccgtcattctaactgtgacttttagtcttctttatccatatccttgccttcattttttcttttattctgtgtgtgtgtgtgtgtgtgtgtgtgtgtgtgtgtgtgtgtgtgactttatatttttgcctccccaatagtattctgaccaaattttatctgataaagctataatcactgggatgtgttttttagtgatgtgggcatttttaataatggctaattacaagcaagaatttattcaaggactggattgaggaatttctaaaagcatcaagaacattaaggtgtattcttttgaagtgatttttgtccaactcctcctaaggctgtctctaaagtgagaaactcaatgtagataggtatgtgtgtgtgtgtgtgtgtgtgtgtgtgtatgtgtgtgtgtatgtgtgtgtttatgtgtatgtgtgtgtgtgtgtgtgtgtgctttcagaaatgttgtgacctctgcacttcacattatttctggtcaatggaaaaatgctttatcggtgattattaaaagaaggaaaacagtgacaaacagcagcaaatgatttcttccccaaataatggattgctccaaattgcaaatccaattactaaaggctcagattcccagttagtggaagttggtgtttattggtgatgatttgggaggatgattctgcaaaggatggttcatacgtaattgattacttgtagatagcaacaactggcattgatgagatgcttaccaatacagcagctttagtgtaacagtgggagaagttaaattgggtcataatatgatatttatgtggattttaatagcttagtaattaaactatagatttttatattcatataaaaatagatcctctttaagcaatgtcactaaaatgacagaccttaaaattcaaataaatcatttgtaaaccaggtggatgtacttgtaagtttgatgaaacttaaatttgtcagaattgttcacaatgagttttgaagtacatttttttttctgaattcttgacatgtgacttgtccactcttggaagaaaacccgaacaatgtattttaagggaaatcatctgaatgcttccattagtccattagtccagtgatggatcctttgtttcctctgtgatacagggataactaggttaggagatttccttcaaacaactgacattttgaaagaatgttccatatcatgtgttatgtccatcgatatacatttaatatataataagaagaccttccctctcaatcttcacttctgttatttgagagaatcaaagttatagaatgttattgtgaaggggaatggccttttgtactcataaaatatggctactcactcaatgtggatatagcagattgttgcttcccgtagacttctgggatttagcaggcagtctctcatacaccaggaacaatgaaagattgcgattattaattttgtccttatgttaatactataatgttgtcaagtaaggttccaagttccttgaaattaagcttgatgatctgggtttaatccccagaatttccatggtaaaaagaaaaatagtggctctacaattgtcctctgagctgtctcatgttattaccccccccatacacatgcacgagcacacacacacacacacacacacacacacacacacacagagagagagagggagagagagagagagtgagagagagagagaggggctgagagagacagagagagacagagagacagagacagacagagagaggaagaagggggagagagagagaaaataaatattacttggaatgctgtaatttgccttaaaatatcaatggcatcaagcattacagaacccacagtatttttactctcttcccatgcatacagtgtcaacattccagtttttgtgatatgtggtcaccagtaatatgttatgaagatttagaatcctagaagtggctcattcaaaaaagagcatcatcttaggatgaagcagatgaacctggtttcatgtttcatggttaaagagagtgtcaagtaaacttatacatctctagtcccaaagctttctctaatgggcagttgactgaccatctatttgattactcctttaatgtagagaaaaaacacaatgagaaacataagaaacaagagatcagaaaatagaagctataagtcattataatcagggaactttaggatttgaatgtctgaagcaccaaatgcttcatttttctctaaccttaaagtaaggtatctatgtctaacagggtgtatattttactggttcgaatgagaatagccccataggctgaggtaattaagtgcttggtctgtagttggtgaaactcatttgggaagatttaggaggtgtgtccttgttggaggaggtggttcactggggtgggcatcgagatttcaaaagccaatgccaggcccattctcactctttacctgttgcttatgagtaatgtgtaagctgtcagctaatgttgcaaaaccattcctgtgtatcccctgctatactccccaccatgaggattatgtactcaccctcctaatctcgaagcaagcctccacactaaaggcttttcaaaaataagttgccttggtttgggtgtctcttcacagcaatagaaaagtaactaagacatgcataaattagatttcttctttaaattatttctgcttttgaaacttatctataataaattagtattacttttgagatcagaataatatattaaaataagacaaatatatctgaattagaaaaattcgtatcttcattgatgtatatgttaaatgttcacctcatgactgtgtagatgcagcagcatctgtttcatgatgaaatgaaataatgaagtattgactggacgtcaagaatactttccagtacctctgggtgtaggcagctccaagacagcttagtttctgactgaaatccaggtgtagatttctgcacagtttcagcgtactgggctggggccagttagaggaagaaagaacttgagcatcttagacatcactttcaaattccagatacctgttgttcatttggagttctcttaaatcagtaatcaccttttgctactcgccctcgtaactgatgtgtcaggtactctgcctgaagaaattttatacatacagatacacatatacacatacatgtttacatataggtatatacatgtatagtacatgtatacatttacctatacctacatttatatgtagattatatgtacaaaattatacgcacacatgtatatacacatatgtataggcagatgcacatatatttacatacacatacttacataagttatatgcaataaaagcacatttaaatacatgtattacaaacctttttatgtacatatgtgcctatgtatgcatatacatatatatgtgtatgtatatatagatgaatgcatatgtatatgtatatatacacacttagaaacataaatatctttacacacaaatatatatacacacttatgcaattgattgggagtgtctaaggagacacagacacagatgatgggagaaagtgcactgagcattcctattcattttacaaacttatgtgtcaggtttaggaggaacagttgggaattatgttaataaactgtggtttccaaacaagaaatttctgttatttgaatgagtacaagatctacttcatggataagactgcaagaccgtacttcattcttgaacggactggctttgtaaatgatgtgtctgactttgtcattgatggaagagtgaatgccttctaagacaaggaaaataccttgcccacatatgaagagaataaggcaaaccctagaactcgatcttctccctttagagtctagtcctgctgacttctaggcaagtcactctttgtcttttttttccaactttttattgattctttgtgagtttcccatcatgcacctcaatccccctcaccgctcagtcccctcgcgtctggtctctgcccttgcaacctccccaaccaaagaaaagcaaaaaaaaaaaaagcaaacaaataaaaaacaaaacaaaacataaacaaaacaaagcaaaaacatatcttgtcgtggaagctgtgttatgtcagaatgtgttccagagagtacccctctgtccacacatcttcccttactaaagcaacaagtcttgtccaagacctctggcttcagccattctctcactattggatccttactgggagtcttccctgttatcctgttgtgacctgtgtcatggagatcctgcagctttggattagcagtgctggccctttaacttattccaacagttaacagatgacttacattttaaggtggcccaattcaaagctctgtatctgggcttgtgtgttaggtgagctggtaagccctcaggctctggctctctcttatcctcaacaacagcactgctgtggcttgcccatctaatatccccatcacaaggggaaggggcacctctctcactttcttgccctggagctagctcacctgcacttttgccaccataaccagctcccgttggctgtccagtcaaggcctagggaccactgttacagtggtcaagggatgggcaaagtctcaagtattcatggcttctggttcagctggctcacccacgcttttgccattatggccaggttaactgtgctgaccaggcaagattcaggactcgcactcccaagccctgcatctactgaggggcagtcttatttcatcctttctcatgacccatgggcctgctctcctttctgcagcagcaagaggatagagggcatctcagctctcctttgctcatgctctcagggccatgtcatctgttccctctccaccactgggccctaccctgggatgcctgggcaatgtgcaggttattccctccacagtggtgagagagggagcctgctttccacaatcatcaagctaatgaggggcaagaacatttctagacagcccttggacatttactgccagtcagctgcccagaccaggaatatccatatggtctctagtggtgacatgaagtgtggagaatgacacaatgactgctctctggccatagaactaaacctagccttcagtggaagcacagactggaacttcatcatggcctcaggtggtgggaatagctcctcataacaggttattccttttcaccttagaggctccagttatatttctctttataaagctcaaactgttctacttctctttctctctgatctgtctaccacatacttgcacattgtaatggtgagacatgtgacttgcaggactctaagtgccattttctgcccatgcttagtggtatggtggcaagctggcatctaggtatctatagctagcctatattgcatggtagtaggcaggtttcgctacattgtatatctctggtgtctgggggtagcctatgtgtttctaaggcctgcctgtgccatttggcagcaggcaggtctctcttgattttggattttaccctagcatttattttacttttcagcaggaaaagttaatgtcatctaaatggatagcaaatagactctgtaccctaatggctgaagaaactgtttttgaataagcttttatttctacaatatgcatttttgtagcagtttttcatgctgagatgcatttcatatcaataggtattcaatgtctttgactttgttcctggaactctgatagtacctgtttaaagaaaatctgaaattagctttgcttaaatggttaataaatcccataaagtcagagcaaaaggtagagtaattttaaaaatgaacaaggaatctttgaggaaagaatgaaactgtagggacatgtcccaagccagaactcatagtgtaactctgactgcagaagaggccttgaagcaaagagtttagagtgtcatgaactttgaggagagagcacattgccgaccacagaacataccctaatatttctgatgctccttctgttcttcatccctaagctgggaactagctttgttctacccttactgacctgattcgcaatgagagggacattttattgttctgctcttaccttccttatttgctcatgcatctttcttatactttctttcttcccattcttattctttcacctcctcatttccccactcttcttttccttcttctccattatcttcctcatcatcattctctcctccttgccaccctcatttttgtttcttttcccacagcccacgatcctcctatatttcctattcctcttcttttttcttactccctttctctcttacatttaactctgctcacttggtcaatttcattgttactactactagatttatatatgactgactatatgatcaattcaagtcttaacacccttggggagtttcctggcctcattttagagcagagattcacactaacagttacttctgtttctgtcttggaatcggtaccatctgcattaattctctctatcatactagccatttctacagaactcatctctagtctgtcctttacaatcatgggtaaagcaaaatgggaagtacaaaggtctccattaattaaaaggtccattaaaggcttaatgccagaactttaacagatgaaagcctgccaagtgcataggtccaaaaacttcatcacaccttttttttttctttcttccttccttttttttccccacatgttctatggactgcagtattcaaatatatgaacttcccttaatattctgcttatgtgtaaaatcaagatctctcttgtctttgttcttgccattggcataaatataagcagttcaaacttaagtggagtttattaatgtgtatgtgaaagaagggattgggacctaatatcagaggaaaataattcatgatataataaatctttctttataatggattgtatgtaaatatgtataccatcatttgtattttgtttcagttttccaaatatttgataattacaatgtaatatatactataactcggtttattaatgaaaatatttttcaatgaattttaaatatatgtttacctccatatcatgcacttgtatgatattacaatattattataattatagtttcacattatctttgaatgctttgaaaacatattactgaaatatgaaactaaaatgataactttgtttatatacttataggttaaattaagtcttcatcatctgagaatgactacctaattaattttcaagatatccttccaaaattgcaaatatatatattttctgttcactgctggattttatcacagactatattgcaaaggaaaagtctctttggtctttgtcaagtagacatttgctttagcctagtcatagatgtaagtaatcaggtaattttaagattgattaaatccagtcttcttgccttcactctcaagtggcacagagtgtgccttgcaatttgagagaagggttgattggaatagctctttattctaattttcttcttttgctttctattgctttgataaaaaccatgaccagaaaaaacttaggcagaagatactttcatcttaaatcttacagtattttatgaaatgaagtcaagacaggagctgatgcagaggtcatgatggagtgctaagcactggcttttcttcttggcttgctcaacctgatttcgggtgctacccaggatcatcagtccaggggtggcatcacacacagagggctagcacttcccagagcaatcatttattatgaaaatatcctgcagatttctgctatctgatggagacattttatcaacggagattttctccccagacaacttgacctgagtcaagttgacataaataaacaaataaataaataaataaacaaataaatagccaggatattgattattgtctggcgaatctttaattcttctttaaagagaaagcaactcgagtcagtagcttcctcagtaagactttagtgcaactggcttagagacataggagctatgctgaatatagcttacgcaagtggcatggaaaattggtaggaactttttgttttttcctggacaaactctagcccggtttgattatatcaggaacctttattcttcaactctatacagactctaaatccttgatacctcacttctcctaattggagcttattattttgtgttaatttttacataaggcatctctatttcacaaatatagaatcaaactaacactgtggttatcccactactttaactttgttctctataatttttttggctcaatagaaacactgatctttgcctctctgacttgtgttgtattggcattgaaagtctgccagctctccatgataaagttcagggtagcaatgtgaagacagaccatcagtctaaataattttgaagatagagatgacaagatcccatgagtgattggaaatgatgtgtgaaaggtacagctgactcaagcatgactctatgatttttgttttagattttttttgccctttccttttctcttgtttctttttttgagaaaaaaaagagtattgactactataatatagacattgtaagtgaacaagtgtttactgttactcttggtggttggaccttgtgagaatggagtctacaaatgaagcaacccaagtctcatgcaataggcagtttactctgaacatcagaaaatttatactctgagggtaaagaaaagtcacatgaataaggacaagacatgtgaggcaaaaacatgtttttctatagaggcatataaataaataataatagttagctgtaatgaataatctgaaatagacttgctcttatctgctatcccttggaaggcataatccaagaacaatttcatattttggaaaaaaatgaggccacaatactcttctctcagtttcttgaaattttctcataaatactcagaaatctcctcacgtgacacttttttttctttctcttttttttttggtggggtggcaagcaagttcaccagaaacatcacgaacttgttctttgacaagttctctatgagcacaactaatgaaagaagaagcagggtgaatatatgagtgtgcatactaatttctctatgtacaaatacacatatatctttgtataggtgcagcagtaggagagaaagggaggaagatggagggagagaaagagaagtagagggagaaaaattcacagtgaatttaaaaattgctcaagagctacttactggagtagtagatgacaaaccatagccagtgagatggctcagcagagaagtatctgctactgagtctgacatcctgagtttgggtctcgggaaccacagagggaaggagaccgccaacttccaaaagccctcctctgactttaagtgtactccgtgacacatatatgtatgcacatgtgcataagcacacactaaataaataaaggataatttttttaaaaaaagcagtgtgaaggaggccagcaagttataaattttggcaagcaaatgtattgtggtcctgaatccaaaggcagcctgtaggaagaattcattagtcttcagagatgcttgatcttgaatataaagcatctgaataatgtggagttcacaaagcaatataaagggtaatttgttttagtcagaatatgttcatttgaatattaattgcatcttaaagaataacagcaacacctacaatcatgtgagatcaaacacctgtgtagcacaatttattcagtttagtgcatacaattaattactttgcagagtacttgtcagatgcctatgagacatctaagaaaaaatgtcaaatagccaactaagcatatgtatctaaatacaagagaaatccattcactagattcaggtcctggttcctcaatatatgtgtattgtggaagccttgcctcatagtccaggtgaagaatgtgactatcacaggccaaaactgtcttttttaatgtttctgggatcaagtcacagtcttgagaacaggacactgattatagtaacatagagatcacgatgatgcttggattcccctgaattcatagaattatgattaaaatggaaccaagaaagtgtaagaaaagaggagggaattttgattcaaaggaacaagaagacatgttaactattgtttaacattgatataggacaaaagcaaaaaatattaactttattgtttgaaaattttgcatatgtagatattgaaatatgttcataatacaccacatttctccctccagctctttctggatcactgcagtatatccccttctaattcatgttctcttttctcttaatacctatgtttatattgctgctcatatgtgagtaggtgtgatgctattcattggagcacagaaatacccaaatgaaagtgcctcttcctcccctaaaagtcataaaatgccaatagctactccctcatcaatgctgagatgaccttcggttggcttgaccttaagaaggtcttcctcaaactgctacaatttctgagttcaggagcacagaagacatgtcatgtccagaagtgagcccttcacagcattccttcccatcctcctactgttacattattttcacttacttgtccatgatattttccaaactttaagaccctggggaagaaggggctgataaagggattccatctggagatgaacactaacagtcacttattctcatccttctaactggttatgagtctctgcataactgcagaaagaaactcaactgaattttttttaaataaagtacattttaacgtgtaatgggtcaatagtggtgctttgttaactaaggtgatacttagacaagagaagtgacagcaattgctagagggtcatccttaaagatattcaaagggtgggatttaggtcacaatatgagatatttttattcaggtttatgtgatagatagttgataacaaagtagttgaacatctacacacagagctgagtttgttcagaaactagtataagggagagcactcttctggttacttctgtcttctctgaaaggctatgggatccagtgaaagtgaaagaggagactggccttaagaactggaggagacaggagagtggatgatttgagtaagtgccacgtatgtgcaacttggaaatgaccattctttcaaagcaaactgttctatcaccttggagaacaccaccatggtgtttatatgcacccacatatattatgcatgtcattagagtgtctgccaccctgaaaattcatgatgaatctcagtgctagaaaaatacatagagagagacctttgctcaactgcaaagtgaaagattagtgagcttatcctgagacaactaatgagacccattcatttcaggtggatggcagagcctctgtgtatagttttcctttaaagggtgtccatattagcacttgcattaagtgaaggagcccaccattgtcaccgtgattctgtgtcttgctcctgtaggagcagtattcattgtgctgaaataaagtttccaagttttatttaaaaataggccacatctttctcttctatataacttaaatgagtcaattttattagaaaaaaaccttctgctttaactataaaaaaggaagaactaaaatagctttaaaatacatgaaaccattaaaatgatccctggtggtatttaaaatgaactatggggcatctgtttgaataccgtattaataatgtggaagcgggctgaaccttctctaggagttctggaacttttcatttccaatgatgtatattcaaagatgacacaaaatgttaactagagattcaaaaatgtttgtgtaaaatatttttaattcagttgtttgagtgaggaggtaggcatgcatgttaatttggtaggaaagtatatcccatggtggggggaactctgtctcacatggatgaatagactggggatgaaatacattcaacaagatcaattttgggtcatttgttctcagaagaaaatatgtttgttggaattttctttgtctagatatgtaggattccatgcctgtcatttatcactcacaaatgctatttttccctttattgttctctcatatattacatcctgactgtggtttgccttacctccattccctcaagtctcctccatgaccctctttccccagatccattatcatttcatctcccctcaaaaagcaggctttcatgtgttttgcaacttgtatcttgggtattctaagtttctgggctaatatccactctagctgcacatgtagcagaagatggcctagtcggccatcatttggaagagaggccccttggtcttacaaactttatatgcctcaatacaggggaacaccagggccaagaagtgggagtgggtgtgtaggggagataggggagggtatgggggacttttgggatagcatttgaaatgtaaataaagaaaatacctaataaaaattatttgttgtcaaaaaaagagcaggctttccaaggacataaaccaaatacaacattatgagctaaaataaatccaggcatgaattctcacatcaaggctagacaaggcaaaccagtaagaggaaaagggtcacaaagaaaggcaaaagagttagggtcagccctcattcccactgttaggaatcctacaagaacaccaagctacacaaacataatatatatgcaggcagcaactttattgataattcctagaaactggaaactacctagatgtccttaatccaaagaatgtattaaaaagaaaaacctgtacttttagacaatgaaatattacttagctgtttataaaaaagtgacatcatgaaatctgctggcagagattaaactacaaaaaaaaatgaaagaaaaatggaagagagcaagaaagagagtgagagagagtgagagagtcattatgagtgagataatccagggttagaaaggcaaacatagtttgtactagctcataaatgaatattaggttactttaaagtaaaggataatcatgctaaaatccatagacccagagagtcaaagtaacaagaaggacttaaggggtcattcaaagatcttcctgagtaggggaaatagaataaattttgtttgtggactaggggcaggtgaacatgggagcaggagggattaggttgctctggtagaaatggtagaggggacaaatactgggagaaatgtctggaactgaagaggatatttggagagcaaagtagaaacctagtgtactgaaaactcggtggactctatgagggtgataatagggaagaccctaataagagggactgaatggagcttgaacaagccatcctctgtaggcaaggtttcaagtgggcgaactgggacatcaagccagccataaaatctctgacctgttgtttatcatgacttcaggatgtgctgagaccaaagcctagtataattgtcatcagagaaactagagggacttcatccaacaactgaggagagcagatgcagagtcccacagtcaaatataagatggagctatgcaagcaaagggagagaggaatttgagatgattcaaccttcacaggaccaaaggtctctcctcccattgatgactgaataggccatcctctgttacatatgcagctagagccaccagtcccaccatgttttctttgattgatggtttagtctcagggacctctggggtaatggttagttcatattgttgttcctcctatagggctgcaaaccccttcagctctttgggtgctttttaactagctccttcattagggaccctgtgctctattcaatggaggattgtaagcatccacttctgtatttgccaggcactggcagagcctctcaggagacagctatattgggctcctgtcagcaggcactttttggcatctgccatagtgtctgggtttggtggttgtttaggggatggatccccaggtggagcagtctctggatggtccttccttcagtctctgctctgaactttgtctctgtaactctttccatgggtattttgttcccccttctgagaaggattctgagcttttgggttaatagccacttatcagtgtgtgtgttcttttgtgattggttaacattaacaaaaataaaaatcggaattttatatactatattcagatcatgattcccctactctaactccaccatgtcttcccccactttctcacctcctgccctccttaagccacaccttttttgtgtctctcattagaaagcagacatctaggtcttaagctcttactcacctccatgactccttttttcacttcccccttcccccttcccccctgccctctctctcccttcatgtttttctggacaacccctcctcctcctccaactcctccaactcctccaactcctcctcctcctcctctcttcttcttcttcttcttcttcttcttcttcttcttcttcttcttcttcttcttctccttctccttctccttctccttctccttctccttctccttctccttcnnnnnnnnnnnnnnnnnnnnnnnnnnnnnnnnnnnnnnnnnnnnnnnnnnnnnnnnnnnnnnnnnnnnnnnnnnnnnnnnnnnnnnnnnnnnnnnnnnnnnnnnnnnnnnnnnnnnnnnnnnnnnnnnnnnnnnnnnnnnnnnnnnnnnnnnnnnnnnnnnnnnnnnnnnnnnnnnnnnnnnnnnnnnnnnnnnnnnnnnnnnnnnnnnnnnnnnnnnnnnnnnnnnnnnnnnnnnnnnnnnnnnnnnnnnnnnnnnnnnnnnnnnnnnnnnnnnnnnnnnnnnnnnnnnnnnnnnnnnnnnnnnnnnnnnnnnnnnnnnnnnnnnnnnnnnnnnnnnnnnnnnnnnnnnnnnnnnnnnnnnnnnnnnnnnnnnnnnnnnnnnnnnnnnnnnnnnnnnnnnnnnnnnnnnnnnnnnnnnnnnnnnnnnnnnnnnnnnnnnnnnnnnnnnnnnnnnnnnnnnnnnnnnnnnnnnnnnnnnnnnnnnnnnnnnnnnnnnnnnnnnnnnnnnnnnnnnnnnnnnnnnnnnnnnnnnnnnnnnnnnnnnnnnnnnnnnnnnnnnnnnnnnnnnnnnnnnnnnnnnnnnnnnnnnnnnnnnnnnnnnnnnnnnnnnnnnnnnnnnnnnnnnnnnnnnnnnnnnnnnnnnnnnnnnnnnnnnnnnnnnnnnnnnnnnnnnnnnnnnnnnnnnnnnnnnnnnnnnnnnnnnnnnnnnnnnnnnnnnnnnnnnnnnnnnnnnnnnnnnnnnnnnaaaagaaaagaaaagaaaccagacatcaaaaattaaaatgatataacataaaagtaacaggacaaaacaaacagacagtaggaaaaataaaagccaaagaaagaacacaagaaacaaatacagactcagaaatgccataaaacaagaaatcaaaaatcaaattatatataagcaacagacctgtagtatcaaaaataaaagatccagacaaataatttaaaaagtaaaaggttataattttgcttttatgatttatttggagcatttctctttggattaatcagaagttagaagttatagcaatcacagatttttctaattcaggaaagatgtggtaacaaaaatggagtaatgatatagtgacttcatttacacttactctttctctctcaatcacttttaattcataaatttactaatgtttatcatactttccctattaagtaattttaatctttatatataactgggatatcaaaactgaaaatggtcatcagtaatgttagttgatgttaatctgaaataatgaaatgtacaaaaataacaaaatcttggagggaattttgtaagatgtgggagactggatatatgccaggagcctcctggcctggagcaggttggaacaagacacagagtaggactcctgtgtgactttaaagattgatggtctcctgatgttctagctctctaactttactgaatgcttatgataacttctaaaaagtcctaaaaccattcctgctcattctgagtgttaaaagccactagtttaggtgattaatacctgtagcctaacagcaggggattaagtaatgtagcctttgttctatctccacaggaatagagtggcactaactttcagccaggtagttgaattctcaggaggaaaaaagtgacattttaagaagtgaatttaatgttttttttttgttgttgttgttttttgatttttgtttttctaagttgtaaaaatattccctgaaagctctctaagaaaaaggagaaagtacccaaggagctgaaggggtctgccacccataggtgggaacaacaatatgaattaaccagtacacccagagctcatgactctagctgcatatgtagcagaagatggcctagttggccatcagtggaaagagaggcccattggtcttgcaaactttatatgccccagtacaggggaacaccagggccaagaagttggagtgggtgggtaggggagcgggggaggggggagggttaggggatttttgggacagcatttgaaatgtaaatgaagaaaatacctaataaaaattggaaaaagttaaataaaaaagttttaaaaaaggagaaaacagaaagatactaatttgggcatgagaaaaatctaaaaagagggcatagagagaataatgctaagaaaagtggggatatggagagagagagacagagagagacagagagagagagagcactcttctccttgtcctcatctcttatacagctttcagaatacatgatcacgtggtataaagtttatcacaagtatacacataaattcaaatcataagtcgaattgacaacagtgaatgctcacaagcatattcattaggagtaatatttggctaaactttcatcacccgttagcttcataggtacatggagagttaaggaatataagttattaatgaagttttgtatagaaactcagtcaggccaaggacccaggttcaattctagaacctatgtaaagatagaacatgagagccaaattcaaagtgttgtactatgttttccatagcagttagcttggccaaaatgatcctacccggttaagatattttcttcatgatttcatgtataaaatatgtgtttttctatgtttatactagcataccacacacatgtggtagttgcagagggccaattatggcattggctccttaaaatggacctagagataatttttaagtggcaatgtgggtgctgggggccatctaggtcctccaacaggtgttgtatttgcaagctcttattcagtcccacttaaatatgttttaaaagcatccccagaggcatttatagatttttgtcttataaataggcctttcatctcatgatgctttatttctggagcaggtgagaggtgacacctgcgcagtaaggcatttgggagattcgtagtgacctccgaggcaaaacacgcagaagattgttgttgaaacttgggtgcatatgctttgttactctaaggttaaataaatttccctagtgaccacctcctgagagaatcggcttctctaagtgttatagaatgacaggtcggtgtgtataacacagccagaatagagttctaaagtttgaactagttctgtcaactcaaagtatgtattttagaaattgtctaaaagtcagtttgatacaatctaggaccatcagtcttcaatatcttcaattagggcattggctagatcagattggcctttgggtgtggctttggagaactgtcctgattgttaattaatgtaggaaggcgaagtcctctggggaaaggaccatgtcttggtttggtgctaggtggttctgtacttttcaaaaaagcaagctgagtataaatcagactttgggtcaggcaactccagtggaccctgttgtattttgcctgtgaagtgagtcccatagtgaggggtgatgctgtataaaatagcaagacacgccttgaagttcctgccttgacttttctcagtgatggactgagtgatctggagttgtttgatgaaataaaccctttcctgccctaaattgcttttggtcagactgttttatcttgacaacagaataaactgtatgaatttaaatcaaccaataaataagcatggaagtgcttagcagtgaattcccttatgagaatttccttaactttataatctaggtaagaagtctgaccctaggactcttggaaaagtatatacacatatacacagtcaatttccaacctatgagtttattttaacacgttatgcaaaaatattgctatcattaaaatgttttattaacatttaaagatcttattttcttatcagtttttcctcaaacaatagcttgtatctagaatatttatgttaatcatgtgagaattccatactatatactctattttgataatattcattccctactcttctactttcctcatcctaaatctaccctccactgcttctcaactttatgaccattttgggggctagttttaatttgttttgttttgttttaaataaactaccctattcaatttctgctgctcatgcattcaagggtcatgggccaccctctgaagcatggctgatatatatttaaagaaagttgaatgtccctcctttcagaagccacccgcagtcaatagcacttcagctgtgagcaggagcatgagtcctccatgctggagattctaatgctgagaagattattctttctgtacagtttctgtaacagaagacaaataattcagaaatgaatgactttgccttcattggtggcactgaagagtaatagaagtgttgcctaaaagctaattaggaaaagatcaacttaagtaccaagcaccaggagttctctaaggtggttttgctgagacatgcttggatgtctctttgctcatggaagcaacagtgtctggtgtctttgcctgctttgtgtggatttagtttcccaagatcagctatcatttaagaatagttaatagcaagtcccagaagtacctaatacgtatgaaaagaatatgggtcataggatttcctgcgtttcttcattatctctactcagctgtagctacttaaccctctgttctcagatcaactgctatggtgtgaccctgctgtgtaatgcttgaagctttgttacactacagtggtataattgttttctgtactccttttcttgacaatcttccactgaacttaagccaggagtaagcttttatccattggtatgtatacaaagagcatgtgtgggatcaggatcatccatgagttcaggcagccctgggaatagtgcaataaatctcctacagatagggaagatattactttcttgctgtctgatattaactaaaaactgtgcttgacagtcttattcccttactataattattttcaaaggcaagcaaagatattttatatttgcttaccatttttatttttacctgcatgactttattgctacttaaacctgatacagtaataataataataataataataatagttcataattttcaggatgagtgaatcccacttgaaggcattaatgtgagcagtttctggtacaagatgacccagaatctatacaaggatctgaggagctcagtaattatcagttgtttttggtttttgggttttttgtttgtttgttttaaaattctaaaaagattcaagtttagttacaagcccttacaaatgtcagtttaccagtaattccacctccaggggatcagatgctctcttctggataccaggacaaatgtgtacagttgaaatacaccatcacagacaccccagacaccaccaccaccccacagacacacacataagagagagagagaatgagagaaggaaggagggagagagagaggggaagagatagagagagagagagaaagcacaaaatctctcttacaaactctgcaaatgcaatcttgttggcacctgtaactcccttccatcatgtctaataacaggatttcacatgacagaaactgtgctttataaaggcaggcaaagcagtcggcaaccagtaaagtttaaaagaggtctaaatgtattccatatcttttactgtcaattccacaagaacagggcaagtacaatattttctgcttaattttcatgttatcagttttacatgtaaccataagtcactcctctcttggaaatatttaagaatatataaaattgaaagattgcattaaattataatatattttaaataaacttaaaaagtagaacatttatttaatttaatgcaatttttctattttaaatgttaatttattacttgagaattccatgtgttttgatcaaatttactttttttcactctcttccttctgtctctatatccacttttcccactcccgtcttgaactcttggagcgttttatgaaacacgaagacatgtcctaggaagaaaataaccttagcattcctcagaggtacacacaaacctaaagtcacttagtgagacaaattttttttaaaagggggtatatggtatacccacaattgatatgttggaatccataatcataattacctggtttttattctttagatttttagtaattgttttatgttccattggtgagagctagtcctcacaatctgaagattttggctaatggatacaaatgggcaaagataggtccagaaaataatgctcttgttgggttgactactgtttataaataaataaataaataaaataaattcaccattttttcttttttttgtgtgtgacagtttgtgtgcatgattcaacagttagtgttaacatatgctaaaatgtttgtggtgtaaatgtcaaactaagtaccttttccctgctacaaaaatttatcctgtgctctgaactcatctcaagccctacaatgttttattaatagtattattattacaaatcttcatttgttggtgaagtagcatgataagctttttgtagataggagggagacaaatatagtagatatactaaaaataatatcaatttttatagctccctaaacgtctgctatatcaacttcttattttctacttatttggtttgttctgttttgatcttgtttaagttgtctttggagtttgttttgtttgtttatgttgttgatgttgttgttgttgtttgttttgattttcttttgttttctgtttttttcttctttagataggatctccctgcttagcccaggctagcttcaagcttttgttaatactcttgcctcagcattctgagtctttggattacaactgtgtgccaactcagcaaactgactttgtttatttctgattaccttcattttaaatctcttctctccagtaaatgtatatttaaaatacaactagatgatattgaatataaattaaaccaactcacttaaatgcatacatgattatgcatatgtgggattaaaatgttagatatctaaatttaggtagcccatatatatcattattaaggtttaggtcttttctttgttggcactggtcactaagataaaagctgtatcatttattgctgaggtcaattcaagcaatttggaggcctgattaatatggtataatgaattgtccatagaaagagaccatcctgagtctgcactaatggactgtttgcatgggagctctaccttgactaactcccttggaaacttaagtatgaacactcacagactaatggaggaagcaggtagctgaattttaaatgaaagtcaaggaaggatgctctgggaatgcagagtgcatcctgaagaagaaatcccatggacaggttcaaaggtaaacactatttctggatagatgaggaactgaaagcagatgactggggctggaggtggtgacttctaagacactgatttcattacataattggctgctctcaggagaggataatgagtttctgagtggaataagaggaaagtgacaaactgaaggtcaggtgggaagataagcttaagaaacttcaaacaagtgctccagacatgggtcctggtttttaatttgaatgtaaatagttaagacatagtgtcctcatcacacagatactctttctctgtaaatacctctgttagaggctatgtcatccattcaagattgtttcctgataccccttaacataactgcctccatcaatattggtttccttttctgcattcatgccaggttccttgttccttaagggatagtgtagagaatatgatgtactaacatgtgcatatggtgtgtgtgtgtgtgtgtgtgtgtgtgtgtgtgtgtgtgtgtgtgttgttgttgttgttttctcatttatttttctcagacattttactctctcatgtccataccaatacaaaagccaggactcttacttcaaagaaagcaagataattcattctggatccaaacaggagtaactactctccagaaatacagaaaattcaccccaaatttcatgttctaatttagtgatagttttatgaagcttacagaggcacaaaacaaagaaagttgtaactcaaaagtttattaaatacattggcaaaaacaacagtagtagctaattatagcaccatggtaatatccctgccacaggctatagatgctgtgtgatgatatttttagtatttatgttgataaagactagggctaggtctgtgttccaaaggagcttacctaaggatcagaaggccattagatgacatacagaaatgaccagtacatttaggaactaagagaacccatagaaagctcaaggaatctatacggatccctgcaagctccactgccagcataaaatcaaattgcagtgttttttttttttatcttttttaagtataattttggaaaaagctttcctcatgacaagtatcacaataaaacttaatgcacggctacttcaaaacttcttagtaaagtaaagtatatatatatatatatatatatatatatatatatatatttgcaaaatacttgtgaccttttcaacaagaatgaattcttttgacagagaaaccatgctcaggataagaatctaagtaggaaggatttttaataaagtaaagatctcttgcaaagtacatggactctctttcataaggatgggttccattgaccaacaaacaatgctcaggatagggagaattcatgggaagcctgattctccagaacagcaaaaggtcaccaggctattgaacaatacccgctcccaggcttcttgatagaaaacaggtatgcatatagcatctgttgaagaaaaagcctgtgtgcttaacagttctggtttttctattgctatctgtaagcacagggacctcgtgtccttctatgcctccccatttataattttaaaaaattggggctcttttagaggccatggctgaatacactgtgtttgtggctagtctacttaatataggcaagcataagagaatgatacagtagctaatagagaaccaagaaaaggagaaagccacctttattagtcagtgatctctaaagcagtaaaattatataattaacctaactctgtgtctctgtctctctctcagatagatagatagatagatagatagatagatagatagatatgagattcattatatgcatgggattcatagaaaaatatatatgagatttcttaacaaaatacatatgggatttattagaatgaatcataggttgcaatacaacaacgggtgactatgaaaagatgaatgggatgtccaagaatccagtagattctcagtctgtgaaacttaatatctctgcaggttttcaatatatgctagaatcctggaaaagtaactttaatgcacttgaagaaatagaattcctaggaaagtgagagccagcaggcaaaaacaaaagttcctcttttccatgtccttaaataggcttccaggtgaagagattacccaaattagatctgaattaagggagtgtcttcctctcttaaatatccagattagaagaggatcttcctacttcaaagtaaaaatcattcacagttgtgacccccattttcgggggtttcatccaattccagatggagccaagttgacaaccaaaattagccatcatactaccttacctataatggctattcaaaggtcacttgagaaattttgtctatctcattatgtaaataattagtttaccatcaatgccaccatcaatgccatcagaaaaatctgatagttgacagcaacacatgccaggaaatttttaactactaagattatgtttgagcatcagataatttatagtagctctattttgtaaaactgtggtcctcaaattaccaatctcttgattaccttcttataatatttatactgcatgttaaaaatttactgattatacaggtcaggttacaaatatatctttttatcccagcaactattttgggggataggaaaaaaaaccaggaaaacaaaacaccaccatcaccaccactaccaccaccatcatcaacaacaataacaacaaaacatcctggcagcaaatattacaagatcaaatagatgtgaagaatcatcacagagctcccttaaatttactaattgacttcaaagagttattaagtaaaatggctgggaaacagccaatccaacataaaccattatagcccacaggaagagcaatagaagtatcattttcacacaaaaatgctctgtcctaaaggtagctatttaccagtctgaagggtgtgattagaagtggaactgcagtgaggaatgatataaagtacacttaaagcataatcaatgtgatatcattgacaggaataacagggggatgtcctatggatatgctgcaggtagagtcaatttttcccccagttatttgtgaataatgcctatgaatgactcacatgatatctaaatttctttttaagatcccaggaatatatgggcttactctgatacaaaactgttgttagtatttactgtcatatgtcaatgaaactagaggtcattttctaagccaagagattgcactaatagccagtcgtggtggtgcacgcctttaatcccagcactcgggaggcagagccaggcagatttctgagttcaaggccagcctggtctgcaaagtgagttacaggacagccagagctatacagagaaaccctgtctcataaaacaaaaacaaaacaaaaacaaaaaaagtgatagcactattctaggtacaataatatcaaatttggtaagcaatacatcaggtatttccattttcctcttcatacacctatagtttccactatcagaaatatttaaaagtacttgattatgcaaaaatccatatcatttagtttaaagtgatcagttagattagaccaacagaaatgttccctaatttatattattaaatattcttataccatcttttatgcacacaacttgttttaaaggacaaaaacacattaactgagaactttcattctctgaccacaatccaactcccagtgtgctctggaatctccatctgttctatttgacattgatatacatgaaaacaagacactttgaaaagaagacaattaagttgcagcattcatagcataaaatgtttaatcgagctgggtttaataacagtcacatagaatttggagagggtcaggattctcgcatttcatgcttttcagtacttgttgtttcctcttcagcttgtgttttaaatattaaaacatatttaaacaaggatgactcaacgattaagagtaagtgcccttctctcagagtatcagaattcagttccttgtactcacaaacatctgtcactccaactccaggggaaccagtgtacatttttggcatcagtgagtaactgtacttgtaagtaccactcacagacacatgatcatagacatgtataacatgtctcttatttaaaatgcaaggtaaactatacatgaataacatattacatgttgagaggtacatggttaaaaggcaaagggataactataggaaagttaaaaaaaggtcattaattatgttaggcttcacagtgaaattaaaggcaacaaattttaaaagattagaaaagaggtctatatcttcaaattatgtaaaaagtttatataagagagtgaaaagtggttttagttggggaataaacaaagacagattcaagattttctgctgactacggttttgtttttgttttgtttttgttttgtttgtttgtttgtttgtttttgtcaaaatgacacaagctagagtcatcagggaagtaggcatctcagttgagaaaatgcctccatcgtattggcctgtgggcaagtctgagctctagtgtcctgattaatgactgatgtggaaaagtcaagccaactgaaggggctactatccccagacaggttgtcaaggatttcataacaaaacagatgagcaacgcagagaaggaaactactaggcagcactcctacaagggttctgcttcagtacctgcctccaattctgtgcctttagttcctgcgttggcttcctcaaggatgaactgtgatcagacatgtaagccaaataaagtccattgtcatcaaattgcttttagtaatggtgtctatcacagccgtagaaatcaaactaggacaaattgattgattattctccgataaggaaatctgtgaattaaccttattgccaaggtaaagtttgcattgagctttcattcagctcagcagagacttggatatttgaagtagtattggactacagagcttctttgtgttacaacatcaagtctgaacttacttaacttgtactcaataattgatggatttgaagctaactttggacttttggagaacatgaacatatcataggagaacatttaacattttatcaatgagtataggacagtgaaagtgagatgtgatttttcaacatagaaacaatgggtaacagtaatgttgggcctcttaaaactaactcattcagttgctgcgtgtgtatgaagtgtgggtgggtgatgtgtctgtgttgtatgtgtgcacatgcacacacattatgcacacagtcaaaggtcaacatgagttatcttcatattactgccttgagataggatcttagcgcttaccagttcagccactcaagctgtccaatgaactcagagatctttgtatctgtgcctctatcatattaggattaccagcatgccaggatttttatttacatgagtgctaagattttaaatccatgtctcagggttttgctttgtattacattttctaatgataaagcctcaggctgttctttgtcaagagctgtgttcttttcacatataactttataaagacagtgcatagccagtatccatgaaatggtgcatgagcaaattgcttctgcactgggctcctgcattcattgtttttgacaagtcgttcttaaatagcaacatgtcactttttactcaatgaggaaggcaattactctgcaaactcaaatggaacatattgttgtaatgtgggcaacatttccttcctcatctaatgttattaattaattaactaatatgttcatgtgtatggtgtgtgtgtgtgtgtgtgtgtgtgtgtgtgtgtgtgtgtgtgtgtgtgtgttcacacagttagaggcttgtaaaatgaagcctggttttacatgggtttggtttgatgattctcaattcaagtcgtcatgcttggatagaaagccatctctccagccccttcctcacttataagtacatgatctgatctgctagatgcattatatcaggttaattaaatagttataatatgttttaaagaatagataagattttagaagtctggagaagtgactcagcgcttaacatacaactttttgagaggacctgggttctgttaacagcatctatattaggcggctcaaccaccaccaggaccaactccaccatcttctgtcctctaggagaaactgcatcgccatgaccatgctcccataaacacatgcacatgcactaaagaaaatgcatcttttctttctaaaaagataccagattgtataagtattgaaacctggattattagtcattccaagatactaagatttttcattaactggcatcttattaagtaagggagttctataatatattctagatgatttattgaattattgattgaaatatgaaagatggttctgagaggtttccaggaacacagagcataagtctttaaaagcaacttaaccatttagaaataagcaaatactgacctaatgtgggtaccatctgcaaatcttaagtgaccaaatgaaggactcaatggaccaaaagtcagtgaccacctagggagcgtgaccttagctgaggctatgccatcagatatgccacatcagatatgtgatttaggaggctaggatgagatttgtgagaaaatccatcagggtggcatgactgaagtctgaaatcattcttctctaggatgagtttctctggttaggaaatgacaatagccaaggattattttaacttttgaatgggagacttaaacatggtacagaaaaggtagatgtgcagtgtgcatacccattattctggcatcttggaagtagatgcaggattgagagcttacaacagtggctctacactatcctgcatattagacctttacactaagatttgctttaaccatagcaaagttacagttataaaatagcaaagaaaatatttttccctgttggagctcaccacaacatcaggaactctagtataaagggttacagcattcacaacactaagaaggttgaaaatcagtagattaagaacaggatggactaaactgtaagtttaaggtcagccataaacaggctatatgagatcataccgaaagaaaaaaaaaaataggaacaaagtaaaagaatcacaagccttgttaatatagagtcatgtggtgaaaaaaatgactcctgaaaggtgtaatcacagagagaggggggcgggggcaggggagggaggtgagggagggatgtaaaataagatggcattggagaaagccatcacctattttnnnnnnnnnnnnnnnnnnnnnnnnnnnnnnnnnnnnnnnnnnnnnnnnnnnnnnnnnnnnnnnnnnnnnnnnnnnnnnnnnnnnnnnnnnnnnggagagagagagagagagagagagagagagagagagagagaaagagagagagagagagagatgagagaaagtaaataatggtaaaacatttaaatggtaaatcattgactacatttttataaagctgtgtgtgtatgtatgtgtctgtgcatggatgtgtgcacttgtgtgcagttctccaaagaggtgagaggagggtatttgatccctaagctgggattataggtgatttccaacctctccatattggcagtggaatctaaaactcaatgtttggtaagagtagcaagaactcttccccatggtgccagcccttaaatagtcaatttaataataataatataatgctaatataataataataataataataataataataataataataataataataataataatccaaaagctcaattgcactaattctggaaccatttaagttctgtgatggcaggcactccactccactcctatttcaaaatacagagatccaccaagcactgtcttctcatatagacaggttagattttgtctggagagatggctcagcagtccagatcactgcctcctcttccaaggatcagacttcatttcccaacacctatgttgggcagatcactatatctgcaattccaacaatatagtatctgataccctcttctggcctctgtcagtatctacctatgtatagtgggcaaacatgcatatacatacatctaaataaaaataaattaataaattttggggggggatagatttctgttccctttcaatgagaccacagccttattgccttaatattccattctctctttctcaccctctcccctctcccttccccttcccccctctgtctcacaactatgatctaaaggtcgttgttatccatgtgcttgacagtgcccctctttatctttataagatgaagagttctgaagagaaaacaaagccttcacatacattttcattatcatcttctttgcatccaaatgttgtcctgctctgataaatgcctctggcactttggagatgtgtagtcattgttttcctgatattgcactggaaatgtgtgctccaacaatattctagattgctgttcaggacctctccaccatcaaaaccaataatgtgggtttatttgatttctttcatttctgtactaatgataactttgtacatttggccacagctgatttgctatgtgtgtatgtgcttacatttgtaagtagatgtttgttatgggatgggcagagggcatggctcagtgggtaaactgcttgctctgtcattgtaaggaacaaactttgtagcccaaacccacgtaaatactatctgtattcccagtgtatgtctaggaagatgagaggcagagacaggggaaaccccagagactcatgggccagctaactttatgtctgaagtagtgaatgataggaactctgcttcaaaaaagctacaagtcaaagaccaacaccagagttagttctgagctcacacatgtgccataccactcatgtacctgaactcatatacatgaacgtgcacacacatcatgtacacacaaatccaatgaaagaacttaaaataaatgtgtgcttgaacacacataataaaatcaaataagaacctaaaagtaacctgacattttctatattttatgaaatcactaattttatttgtcagatgctatttttcatgtgtcacacaggttatgttctttaaatattctatatcacgatattttcctttaaggaatacaatatcaggaaaacatggtgctatcctttatactggggtgtcccataggaccacagagagtgaacacattcatgattttaaatctaattatttttttaatatcttgtatgtattctcttccttccaaatgacacttgttttcagtgatattgtcaaagctttttaattaaaaataattttcttctaataattacttaagtatgcacatctgcatgcatgtgatggtggtgcctatcaaggccagaaaagaatcttggattctgtagacttggagtaacggggagctgcagtgattcacccaatgtgggatgttagaaaccaaatttgagtcctaccaagaatagcaagtgctcttcaccactgagccctctccgcagccttgctttcttaaagttttaagattcacttattatatagcattcatataccatgcctactatgtaataatataaatgcaaatttctattttgtatgattttgtatgattctggagacagctgttgtagcctaattctcatagttattatactcagatcttctaatactgtattttatgataacatgctcatagctttctacttgatttgcatcacaaatgagtgctggtagcaaattctgaacaggctctgaaatatattaatggcaaaacctcttgcaggcctctggcatcaatcacattagttcttaaaacaggcagtatcttgggtgcagtatttagtaaagtagcttttataaaacaagcctactccatgtaaaaaagagaaatatattaatagctataaatgtgagttatggtagtaatgtaattcacatgtcggatagcaggaacagcatagataaaattaactaggaaaataaaagcagaaggctatggtatgaagacacctgaataatttgttaacttaggaaaaacatatactcatacacagacacacagacacacacacacacacacacacacacacacacacacacacatatatatgtgtgtgtatatatatatgtgtgtgtgtgtatatatatatatatatatatatatatatatatatatatatatcctaatcctgaagctattgtccatggttcatgtacagactgcactgatcatgcatgatatttgccatttgaaatttaaaaagacagaacatctattaatttcacatttatttatgtcctagagcaccatgaataatcagactggtttcatatacctgggtctctatcctttcaggtgaaatagcttctcatctacaatgattagatgttcaatgtagaatgcttaagaggaagccctttgaaggcccttcctattcagcagtgctgatgacaaacagcgtagtggagtgaacacttgagctctctgtctctgtctctgtctctgtctctgtctctgtctctgtctctgtctctgtctctctctctctctctgtctctgtgtgtgtgtgtgtgtgtgtgtgtgtgtgtgtgtgtgtgtgtgtgaatatttgagtagctcctaactcagaaattatgatctattttgaagtaaattgttcttgtaactcctctaaaacttcaggtatggacaggttagatggcttgctgacttgcctgaagacctgagcttgatatatacgatatgatataaggataccacctactcctggaagttgcccactgacatctgcaatatgaacatatgcatagaataataaaaccagtaataattatatagagaatgttctacaaatgatgtatatatttaaaaacctcaattacgattattggactaattttgattctgtgactacttgagagtcatctaccaattcctgctgaactgtgggtttggttttatgatcactgtcaattattttttttgttttaaaagatataaatataaatgaagaaaatatgtaataaaaaagaaagttgttgacaaaaaagaatttcttagaattaatgattacacataatacaagtaactattatatttcttttaaggttaattatatgtaaagtctttttttctcttttctagaagaatgctttagttatttatgcttctattgctggaataaaatatgatgaccaaaaacaactttgggaagaatatgtttacttcagcctactgtcttaggacacactcccttactgaaggaagtcagtacagaaagcaggacacctttctggactgctccccagagtttactcagcctgtttgcatacacagcctaggaccatctccccaaaattggcaccacccatgttgggataggatattagtcactaaacaagaaaaggtcccccaggcttgcttacattctaatcatcataaagtaattttctcaattgtgaatacatcatcttctctgataactgtagcttttgtcaagatgaaaaacaccaacaagaattctaaaaaattgtgctttcccctcaacacacaagcactgaacaatacagagtttgacatatatccatgtgtatttgtgtgtgtgtgtgtgtgtgtgtgtgtgtgtgtgtgtttgtgtaggagggttgaacatataagtgcaagtgcatgtgctagggaccagaagactccaacaaatgccctgctctagcacagtctctcttttttccttgacagaaggtctctcactaaagtagatctaggtagccagccaacaatcaacagcagtcttctggtttctgctcaccacagaaattaggataacaggtatgcatgacgagtccctgttaactcaagtcttcatgcttgtatagcttgtgctcctacccactgagacatttctctagacctatataggtttagactttaggtcttgaaatatctttttttttaagtgctgataatttattttccttttaaggtaattagtaaaattatttgaaatgtcagtattcctaagaggcatttattttcctatttgtggacttttaaactattacattttttggaaaatctgctcttttataattccatgtaaaaattattccctacaagccagggtaaatttgctatcaattttacaataataagtagctttttggctttttaaaaataaaaggagtgtctgggtttggtggctgtttatgggatggatccccttgtgggggcagtctctgaatggtccttccttccatttcagctctgaactttgtctctgtaactctttccatgggtattttgttccccattctaagaaggaacaaagtatccacactttggtctttcttctttttgagtttcaggtgtttttcaaattgtatcttgggaattctaagtttctatgccagcaagattttgctgacaggaccctgatatagccatctcttgtgaggctatgccagtgcttggcaaatacagaagtggattctcacagtcatctattgaatggaacatagggcccccaatgaaggatttagagaaaatacccaaagagttaaaggagtctgcaactctataggaggaacaacaatataaactaaccagtatcccccagaacttaggtctccagttgcatatgtagcagaggatggcctaggccatcaatgggaggagaggcccttggtcttgcaaagattatatgctccagtagaggggaacgccagggccaagaagtgggagtgcttgggttgcggaacagagcaggggagggtataggggaatttcagagagaaacctcggaaaggggatagcatttgaaatgtaagtgaagaagagatctaataaaacataaaaataaaaataacatgataaaatgatacatttaataggtttggagctcatttaaatgaatgttctggaagtgatatagttgaggcactgttccaccaactactagagtatggactggattttcaaactcaacatgaatcaaagacaaatgatgtaaagtccagcctctggatttcagttaacttaggtttcagctcctacaatgctttggaccaatcacatgaaattcatgttgtggcttagctttcctaatctgtgctaagtgttttgttcattgactttgagctcagaagtctgctgttctgtctggaaaaagaaagtggcttttcttcataagaacaagctgcaatgaaattttctcttcaaggaaatgtcctgcctttctgggattgatccatgaattccatgagtgtgtgtgtgtgcacgtgtgcgtgtgcatgcacgcttgtatgtgtgtgtgtgggggggtgtgtgtttgcacagtggctgtcagttgtcagccttaggtatcattcttcaaaaaaacacagtcaaccttagttttttactattaagcctggaactcagcaattagtctaagctattaggccagcaagcccaaggcatcattttgttttcctcttcccagagttaggtgtatattatcaaacctagctctttaatatgagttctggagaccaaagtcagatactcatgtatacaggctgtattagttactttctgtagctatgataaaacacaaagaccaatatcagcttaaaatagggtttggtttatagctctagacaaataagagttgaccgtggtagggaggtatggcagcatgtagcagggagcacgcagtatgcaacatgcaacaggcatgaccacaggaccaggaacctgactgttgagctctccaacctcaaaaacagcacagaggaagcaagttgaacatgaagtcaggctacaaactttcaaagcctgtgccctattgacacactttgtccagtaaggccacaccccctttaacctcatcaaatagcacaagcaactagggaccaagtattttatacctgggctaatagtgggcatttctcattcaaaccagtacactgtttggtcattttactaagtgagcatcttgccagcccaagtaattgcaattataatatcacacaggctgaacccaggatcctctctatgacaggcatagaaagggaaaggcaatctgaggactggattcattcagtgtgaacaacttcctgaggacctgaggtgacactgagctatgatgagaaggcaaaagagccttcagtttcctgttttaagcagtaaagatggttgtacacatattggcatgaacaaacacagagctacacaaacatccacaatggtggattgaatgaaaactattcctataggattgtgtattggaacatgaacatttgttcatgtgcagttgatggtgctgtttttggaggttatggaatctttagaaggtgggatcttgctgaaggaatgcctcagaccctctggatccctttgcatggaacgggtctcgaattgcaggtgggcaaagcgttggatgagacaacagacagatgcacacaggagaggttgtgtataatctgaatgtaatttgtcaaatcgagcatcaaactttttatacagaagaaaatagggaagttgggtgacacaccagcaaggtacaaagaggttactggattcttacacaaaacagaggaatacaaacacagaaggtctaacaggaaccacctgggatagaattcattgctaacaactgagatcaaaaagaactccacctaaggtcctcttaatcttagaagccagggtaagggctccgtgcccttgccatagttactagtttagtctattgtatagtccaccttccccctaggccattgtaaatatgtgtgtatgggtgtaactcagctatctatagttctaagtatctattctggttcctccttaggtctcaaacttccttcttcctagtttgtaaattcctgtgtagggcagtgtcttagcttttattcaaagtgatagtgtaatgccagaggcaattctgaatgtcactgaataggcaaaattcttactgaatttcaagcccatggtcagctcaaggactttctaggaagttggaacactggtgaagacttagaattcaatcttaaaaggcacttataataagataatactaaaagagagcatgtggatccatacaccagactaacgcgggaatggaatatgagtatatgggttaaagagaacgccagactccaggaggtgagtttccgtgaaactctgcctcatgagtggcttccaggcctctcggcctgtcaagctgactcgaccggagtgcatggcaaaggaagaatgtccctgcatcagctttgaagatttttggccttattgaactttctgttgtctttctcagctccctgtgtgcagataaaatctaaattctttgattccattcctcttcctcctgccatgcttctccaaccattacaacctcaatctctataaaactgtaagcccaaacaaaccctttgttccctaaattggttttgatcataatattttatcacagcaacagagagcaaagtagaacacccacatacaatctgtacttattttacacacttttgaaataaagtaatccatttgtcatgctgtagctaagtatcttccatatatttgcagcctcattcaaattcacctctgagaaatttccataataaccaactttagttctaactctttgtgctatagtcaccatgtaaccacaagttgagctttgcactcattggcttatgtagcactatttcagctagtcactgtataagcagatgtgtgtagttctcacatagagcaaagttcacagtcctgtagtatccctgttttaagatcatgcatgcattgtagttgtattaatggccagagagatggttcatgggtaaggtaccaactatcacatctggcagcctgagatctgtcctcagaactgacatttttttggggggggggtgctgactccaacaagttgccaaatgatgtcaacacatacatcttgtcatgcacatacccaagcatacccaaaaagcaaacataccaagaaatgtaatacggatcgtggaaagaggaagtacatccacaaagatatatatgcagcaagaagattaaaacttccaacgagcaaaatgacagatattaagtgtgaatcatgttttagaagaaatagtgagtctttgcatggtcctacagaccacagaatggtccctagacacaaagtaagaagaagtgaatgaagggaggctcaacagggatgtgtaccacagacattaatttctctcagaaatagaggtggaatccaagatcacacaaatgtacttccttctgaggacttctctctgacattcagatgcaaatcaagtcgtcttatctttacatggggaaacaagggggtgtcctttcaagtatctctacatatacaaccattgattataaagataaaatcatgatccatacttagctacctttcagaggcttttcttaagttcacactggggtgagtgctttcctgtgtgagtgagtaggcacaatctcttttgtgaatttgtgcacacacaatctcctgtgtgaatgactgtggcacacatacacacacacatagacattcaggttgtagtgacaaaccaaggttacagtgagcatgcagtagggcagaggtagatgaaggcatccagaggggaaattttggattaaaacacttaacattaaagcaattgtcagatactttatgacagataaaacataaaataccacatgttggaatcagtgtcaaaattagaaaaaagtgtgacaagtgaaggagcagaaatggcactgtaagttcttaaatcacacttgagataaagattggcaagtgctgttcaaaatgcacttaataagtttttatatatatatataaataacctcatccaaatctcaacctttaaatctcaatgtttctattgtttgaaaatgtattgaataaatatttttccacatttcactgaattatatttttaaataatattttaaaaattattttgacaacttatgtccatacacacatctatcacaagcacacacagacacacagacacacagacacacagacacacacacacaacagaaattcaaagagaggcacacacacacacacacacacacacacacacacacactaatgaaagagagagacagagaatgggagagaggagagaaagggagtgagagacagagcaacaagaacaaagacagatattaaccaggactgatgccctgaattcaatcctcagttacaactttgtaaaagataaccaataccacaagttactctgacctccatgatcacactgcaacagatgccaatacagtcacccaacacacacaccaaaaaactccatatacacacttaactataatttcaacaaatagaatatattattattattactattactattattattattattattattattattattattattattattaaagcattttattgatgagaccccaccagctacagtgattctggaatcaagcaccttcctccttggcaatgcaatttctcttgagtgatcccatgaatgctttcttctccatggtctggaaacaaccgtggctaaacttggaggtggtgtcaatgaacttcaggtcagtcttctccagaacccgatgtttgttctggaccagcaaggactttggaagtgtaagcatttgcttcttggttcccaccacacagcctttgagcattatgaagtcattagtcacctcaccatgatgcacaaagtcacccagtgggttgaggctcttgtcagacaggtcatagtcagtgtatgcattgatcagtttaccatccttgatgaggtagccttgaccaccaatcttgaaaatcttcttgttaatttctatttgctgatagtagtctttctgcccagcttgagcctctgagaaggatacatgggctggatgccaggctccaacacaggcaacattgcacaggccccaatgggtcttctgggacagtttctctgtataccaacgactggtcacccctttgtaccctttggcttttttcatgctgatgatgtcaattatctcatcctgcccaaacacctggttcacaggaacctgttgctccagactctctaggttccagtctagctaacttctcagccaccataaccccattcctctggataaacatcaagtgggtcttcttataccatagaggaaacagatgcatctgactgtgggcaatggcctgccagtacttcttgatgctgttgaagtccttctcctaatgtttcttgcctgtgccattctgccatttcttacagtacttggtggaaaccttcttcttagatttggaacagttcttataaaaccaccttttatacttattgatatgctaggcaaatagtcttgaaggtctgtaggcctcgaggggtttctacagatcccacgatgcccacaaccactgtgggtaggggttccacaatgattacagcctccacgacttctttcttgttcaccttcgatcctggcctgtcagtgaccacgatgtgggtcatgccaaccttgtaccttagacaggctgtgaggtgaataggcttggaagggtcatccttagggaaactcttcactttcccacgatgccagctgtggtgctttcaaggcaagaagcccaaggaggcatgtctgggaactgagaatttcctgtgagacatcttgccgctacacactaccaatagagtgaaaataattttgataggccatgaaataattcaggtttctcattgaacgttgaatataattttagctttcatagctatatttaaagttctagaatatagtgtgggtagtgattttatgttcttaaatggtttgaaaaacaatacaacaaataaaaaaattctttggaccatatacacccataggagcagaatcctgagatttgaggatatacaggcaagggtagttggaaaaaatctgtaagaaaggtggcacagcactgtagcctcagcagagggaggactggcttagactgactaagagtaggaggtgaaatgtgaaaagaaatgagattctgagattcctttcatcctgcagatgaattttgacttttctaaatcaaaagcatttggaaaaagcaatttagacagatgttatcaagaatagaaatattgctttttgctttctgaaacaattctgttcattgtagataaatgaagtcagaaaggaaaggagggttttcaaaggcattagtttaagtcctagtgcaacagaaaattcgggcctctgttgtgtgaagcatggtgacaggagactggattcacagtagaaaattttctttctgcacagtgagatattaaaagtaaactgagtgttccaatcttcagcttgggtgagctaatcgaaatgaatacaattgacattctctagcttaaatttatttctacaaattcatggtaggaagtttatttgctgagatattgttgtttttaatctgaggacaagcaaaatgtagactgattatttttcttctgaatcattctatccttgaatataacttatataaattctacaccaaacgtgtacaaggaataacttaaaggttactatgttgaatttggtgttcaagtataattctctactgaaagaggcttggtttcagataatggatggattctcacattgaagctgaaatattagatctattcagtgagccactgtgaacatttagtgaggcccatttggactattgataggtttgactgacctagggtattgtaaagaaatggtgtgttagttatactcctgttgctgctttaaaacaccttgaccaatgaaaattttggaagaaatttatttggatttacagttttatgtaggggtatgagtccatggtttcatgtgaagctttttgtttctactctgctattatgtacttagttgtatgtgaagaatttcaaactatatttatttcagttaatttattataaatacataacaatttctaattgctgcacgtggtggtgcacgcctttaatcccagcactcagaaggcagaggcaggcagatttctgagatcgaggccagcctggtctacaaattgagttccaggacagccaggtctatacagagaaaccctgtctcaaaaaactaaagaaaaaaagaaaaaaaatgttgatttattcttatttttatcctttttattctggtttttgaagcagtctcactaagtagccctccctgtcttggaactgtctatgtagacagtggacttgactcaatcttcctttgtctaccccctgaatcatggcattataggcatggattacaatacccagtctaaaatttgagtttaataatatatgacatatgtcgggttcacaatgtaaaaagtatggcattttcctaaaagcacatagtatcactgcgggtcaaacacttgcctctgtgatcgtgagcacaactatttcctggcttgatggtgcatacctataacagcacataagaaatgggagcagaagggtaaagatagtgagcttgggttacacagtaaaaacatattccaaaatggcaaggacaatatcatttactgattattaggtatcatagaaattaagcagtttaggcatatgagaaattcaaaatgttgcctaattcaaaccctgtgtatgacttcatggaaaataaatgtatttgatacaagaagatgcttagtatggaaaagatacttactattagtgaaacattcttcataaattatcttatatagtacctatatcaaacaacagactgaattgtctttcttctatgtatctcttttgtgttcatgcaaatcaccccttaattatcagttcaaagtttcacaacactaaaaacaaagtatatttgctaatttctacactttacagggcaaattaaaactgtggcccagtgttccacgcactccatgtcatgcccacactctttcttctggagtgcacacaatccatgtagactgtgtttctgtaaagtgccctgagttctcccataaacattcatgtgttactctagatgtagagtaggatcaaagtggcttgatgtcaaaggagaccttcacagtatcatagatggttgaacgaacagtatcacaggtttaagaaatttttaaacactgatcttagtaggagctagaatgatggctcagtgattaagaacaaaaactcctcttccaatgaatttaaatttgattgccagaacctatactggacagcattttccaaattataaaaccatcagatgagcatttatttgtaagaccagagttggaacaagtagctcaaatctgaagctgttctgaagcactttaaaccctgaagtatgagacttctatgaactcaaatgctttaattagcagattcgtttttctttataaattctgtgtttgcttctgtgtgaggggccgtagtaggggtccacacatttggatacacgtacgaatagacaccccactcctagagctggagctagggcagtggtgaatggtccaatataagtgctgggaaccataggggtggactaataagttgaacacaagctttaaaaactagttagatttagcctgtgaaaaaaaagctctgcataatgtttaatctcagagaaatattaaccagaaccacaatgagataccacctctcacccataatcatagctactatccaaattaattttctaatagcaaatatttacaaaatctcctgagtaaagtcccactttttttcctatcatttttggttgcatctgtttcttatgcagaaccaggaaagaatgccatccagattctgggttcgtggagctcctatggcccatttagttttcactatttttctgttcttcctggctttcacttcaactgcaaatgttcttagtgttaaaatagctaaatggtttgttgctttttcttcatttgtttagttttttcttctcgagcagtgtctggataaggggatgatgctctatctaaggtgatttacatcaaatctggagccttggtcactgctgcttaccaaagaaaaacctgtttatggacagaaaggaaactgagttctgacttttcagtcaatgttgttaattgttctagaccttctcattttcatctactgagacaattttcattaggctccctccaaggccaaatctctcctcccatccagtcttctttcagtctttatctttatatggggacacaggactaagctaagtgtgtgaaatcaattgcaattaaaaacagaggtttttgcagttagagcaaccgttcattgcttaaggtatgcagccatatgtaaacttttgcacatagtgaagagtccccatgccatattccataggttccagattgaatttgctgaaagaaaatgataatagacagcttaagagtaaaaaaggacatgcaaacttattccacacaccacttaccactctcatgctcaccacaccctcaaacacacacacacacacacacacacacacacacgtgcatatatatatatatatatgcatacatatacacagagggacaagggggcactagaaatgaatattaattcagtgcaggtaatctttgaagtgacatatatttttgtgtcaagatccctttttgtcaaccttcaagaggtttaaacttgatccaagaatatagcatttctttttttttcacagatctcttaatgttcttttgtcctcttctgagataatccctgtctctttgctcgtgtgtgtgtgtgtgtgtgtgggtgggttatgtgtgtgtaatctatgtacacatgcatgtaaatatgcatacacatatgtgtgtacacaggctgtttttaggtgttcatgttctaagtatcactcctcacattattcctttcacacagggtctctctcactgaactagagcttcaggctttttctagacagccaggaagtcccagcattgatatacccaggctctgtcagcttggtatttgaagtaaatactttagagaatcattttctaaaccatgtctttttttttctgttacccacagcaagagatgatgctcagttcctggtgtcatagtgttctttgttccatgctgagaaaggtctgaaagcacttctgcttagaggaactgagatcttgactcaagtgacagaagagagctttacagagaagcaacgttggtgtttattaatggaaggtctgaagtacatggtgatgcggccacagccgcagggcttctcagttcctttcttcttgaagacctaaattcagtcaaaaatcatagacagtttgagcagaagtctcttcaggaattcagcagaagcaaagcaaaagctcccgagagaccctggagtggggattcccaaggagaggaacagcttatggattttatggatgctaatggtggttttataaatttttattaggcaagtgacatattcatgagggaaagtcctcttttttaatgctccaaattaggatagatatgatctttagggggtttcctctcaaggcctccacaaaagggaggcagactaccatgcagtggtaagataataataatatcaagtctcttgaagatgcatgcgagtgtgggtgatcaccatagtgctgtgggggtttatggtttcacaggcgctaactaactgcagtgtcagctttttaactaccaaggaatatctgagcatcagaagcagctaccaaggtgtgacaccaccttgtagctcgcgcattgatgcagtgtgttgccttctctaaaataggtgatggctttctccaatgccatcttattttaaaattagtctatttcctcagaaggttcctttcttcaatgtccaaggaaaaatttcatagatgttggaaagctttctcagtcattctatgacttattatcttgaagcagagtctctccaaaaatctgaagctactattttcagttatactcacactggccagtccctgacattctcctttctttcctttccacaactctgactttacacacaaccacgcatacgtaatatgtcctgtttgtggtggggatttgaggtaatgttctcttactagtatactgggggctcatgctaactgacctgtttcttcactctatatcttaccatgtccttatcctgcctcacaaacattagctaccccctttatgattgaaaacattagttatattagccacaaatgagatctattttgtgtttacatgtatctgataccagctagctgctaagccccagtgggtctcaagatattttatttgaccaataacaaacttgagaatagaatggtagtaatattatttagtagtaaaatgtagtgtgtatgacaattatattggcaatgataataaataatgtgtaactgaagcaagcttcagagagctgttttagagtggaggtggctaagatcacgatagaatataacagaccatgtaaattctgggaaaaaatgagacatgtggcaatggatggtgcttccagaggcccaaattcagtgcccaactccatgtcacctgactcacaaccgtctaactccaagggacatggcagtttcttctcgtcttcctgttcactgggcacacaagcacgtttatacatgcttgcatatatatgcaaattttaaagtaaatgtaaatattaaaaaagaggaacacacacctactgttaagcacaccaatgatttatctgactgtggtaaatcacatccttggctaatgggaatgttatggattgacccttgaaaaacatataatatacatttatatatttttaaatacaaatattactcattattgcaggatgagaacaatgtctgttaaggaatcctatttagttagtagaagctaactatttattttttaaaattactacataaaagcaagttacctgaactggagagatggctagattggtaagagtgtttgtttctcaagcataagactataaagtcagattccagatactacacacagaaaagctagctgtgattgtacacatctatagcaataattgtgtgagacggatgatgcctgaatcttcatttcctcaagcttctggtccagtgagcgggcttctctgaaaagctcaggtagacatttctcctctggctttcttacaaccacccatgctgtgcgtgcacatataccatgctcatacacatatatacacaaactcaaggtattttatagtatttattgtaagagctcctcagttctgtacaaattcataagtttgcttgaatatatatagctaaatgaaagcagtacagttgaatttcattcacagtctgaagagcagaaatgactcagaggtttacgtatagaccatattttctaaactagtctccagctattttgtagcaataattgcttctgaaagctttcctttataattttatttctctttagtgtcattcacttaagtaaaaataccatgcatgcagtaagaaacctcttttagtttactttctcccctatctaaagtagatctcaccaaataataagtattctgtaagttgggaattgtcatttttgcctgccgcagtcccagtactgaagaactgaggaaaaagatggtgagatgtagcccagcatgagccacatagcaagagtctgtctcaaaaaaaaaaaaaaaatctaacaaaaacaaaataagaaatcaaaagaaccaaacaaacacaaaagtgcttaattatttttaaaaaattcttgactaaataaataaatgcattcatgttaaatattttgaaggaatttcatatataaaagataagattttaagaaaattagattataatttagagattagttatattgtgtgtgtctttgtgtgtatgcatgtctgtgtgtgtgtatgtgcacacatatgggtatgcatattgggaatagaattctgatcttccaatagcatgaaaaatattgttatggactaacagcccctaaagcataatttgaagtaagatgaattgtcctttattttggtaagagtattactatttgggagggtgaggcataagcattaaaattagttcaaactcagcctggtttacatagtaagttacaggctagacaatgctgctaagtaaggttgtctcaagaaatgaaggaggaaagaaaggatggaaaggaggagggaggcaagcagttaggcaggaaggaataaatagcttacagtcataataactttaaatattaaaatggtaagatgaaaattattttctaaatgaatcatctattttattttggagaacatttgtgcaatattcattgggcaagagccaagagcctttaaggaaaaaaacattcattttaaggttgaaaaccatattaaaacaataaaattattgatgttgatctctactagggagaattgtaagagcgaaatagacccaaagacccagtgagagagagaggcagggctcattgcttattatagctgacattgcctgctcatagcaactgtactcagctgtgatcttctctggttatgtgttctatcactgagtgatcactcggcccttgaccctctcctatacccttgctttgatattggatatagcatgtcagcaggtagtgctagataaggattcactctcttcattttcctgttagaataaatatggtgctacagttatgtcctagtttctctcctgctacttgattaaaaaatacctaataaatgccacttaagagtgaaagagttggttctgtcttgcacgcgctcaactggccaggaagaacgacgctgcaacaggatccttctgcacacgtttattgggagagcattgattgcataggcgaataaagaacaacaaccccgaacaaggaaaatgatgctgcttatatacccctccatgtgacgtgtcagctcctgattagctgctcactcattaccccactactacgccccgggatgggcagtgacttggcacgaatttactcttgcacctgtgcacattacttgtttaccagttaggcacagcggaggctcgtgatggaaattgctcacggctctccacagtgctggctcagagttaggttttagtctgccatggtatggtagttaagtcagcaagatcttgaagtatctgtgccttttctattaatactcaagaaagaattaaatgaatacactcttgcgatctgctagtcagttacttttctccattttagtaatccaagacttcctcctctggacatggtcttatccagtcttaaaatgtatctttctatgacagtcagagtaatcaagaaatctgtgattgtcttggctagatattcatctctagaggtttgcattgttggtgggattgcaagcttgtacaaccactctggaaatcagtctggcagttcctcagaaaattggacatggtactaccggaggatcccgcaatacctctcctgggcatatatccagaagatgttccaactagtaagaaagaaacatgctccactatgttcatagcagccttatttataataaccagaagctggaaagaacccaaatgcccctcaacagaggaatggatacaaaaattgtggtacatttacacaatggagtactactcagctattaaaaagaatgaatttatgaaattcctaggcaaatggttggacctggagggcattatcctgaatgaggtaacccaatcacaaaataactcaaatgatatgtactcactgataagtggatattagcccagaaacttagaatacccaagatataaattacattttgcaaaacacatgaaactcaagaagaacgaagaccaaagtgtgaacactttgcccctttttagaattgagagcaaaacacccatggaagaagttacagagaaaaagtttggagctgagacaaaaggatggaccatctagagacggccatatccagggatccatcccataatcagcctccaaacactgataccattgcatacactagcaagattttgctgaaaggaccctgatatagctgtctcttgtgagactatgccagggcctagcaaacacagaagtggatgctcacagtcagctattggatggatcacaggaccaccaatggaggagctagagaaaatacccaaggagctaaagggaactgcaaccctataggtggaacaacatataggtgaactaaccagtaccccggagctcttgactctagctgcatatgtatcaaaagatggcctagttggccatcactggaaagagaggcccattggacttgcaaactttatatgccccagtacaggggaacaccagggccaaaaagtgggagtgggtgggtaggggagtggggacgagggtatgggggacttttgggatagcattggaaatgtaaatgaggaaaatacctaataaaaaagaaaagaaaaatttcctcataggctcacaaacgacggcagcattgttggaaactgtggcctttttgtaataggtatggctttattggagcaagtgtgtcaccaggggtgggctctgtagtttcagaaattcaacctgggctcaggggctcatttttccttccttctgcctgaggatttaagtgtagatatcttagcccttctccagcccctagcagcctgcactttaccattcttccctctatgacaatagtaaacaaatctctgaagtgtaagggagtccccaatcaaatgcctttctttataagagttgccatggtcctagtgatacttctcagcaatagaaactctaacacaccatttcctaagagactctagattctattggcttgataacagtaattattacaagctgtatcttccaggtacacgaatgtttagctgagctatatattagttttttcagtgcatggggcattaaannnnnnnnnnnnnnnnnnnnttcctttataattttatttctctttagtgtcattcacttaagtaaaaataccatgcatgcagtaagaaacctcttttagtttactttctcccctatctaaagtagatctcaccaaataataagtattctgtaagttgggaattgtcatttttgcctgccgcagtcccagtactgaagaactgaggaaaaagatggtgagatgtagcccagcatgagccacatagcaagagtctgtctcaaaaaaaaaaaaaaaatctaacaaaaacaaaataagaaatcaaaagaaccaaacaaacacaaaagtgcttaattatttttaaaaaattcttgactaaataaataaatgcattcatgttaaatattttgaaggaatttcatatataaaagataagattttaagaaaattagattataatttagagattagttatattgtgtgtgtctttgtgtgtatgcatgtctgtgtgtgtgtatgtgcacacatatgggtatgcatattgggaatagaattctgatcttccaatagcatgaaaaatattgttatggactaacagcccctaaagcataatttgaagtaagatgaattgtcctttattttggtaagagtattactatttgggagggtgaggcataagcattaaaattagttcaaactcagcctggtttacatagtaagttacaggctagacaatgctgctaagtaaggttgtctcaagaaatgaaggaagaaagaaaggatggaaaggaggagggaggcaagcagttaggcagtaaggaataaatagcttacagtcataataatttttaatattaaaatggtaagatgaaaattattttctaaatgaatcatctattttattttggagaatatttgtgcaatattcattgggcaagagccaagtgccgttaagaaaaaaaaaacattttaaggttgaataccatattaaaacaaaatcattgatgttgatctctactagggagaattgtaagagcgaaatagacccaaagacccagtgagagagagagccagggctcattgcttattatagctgacattgcctgctcatagcaactgtactcagctgtgatcttctctggttatgtgttctatcactgagtgatcactcggcccttgaccctctcctatacccttgctttgatattggatatagcatgtcagcaggtggtgctagataaggattcactctcttcattttcctgttagaataaatatggtgctacagttatgtcctagtttctctcctgctacttgatttaaaaaatacctaataaatgccacttaagagtgaaagagttggttctggctcagagttaggttttagtctgccatggtatggtagttaagtcagcaagatcttgaagtatctgttccttttctattaatactcaagaaagaaaaaaaatgaattcactcttgctatctgctagtcagttacttttctccattttagtaatccaagacttcctactctggacatggtcttatccagtcttaaaatgtatctttctatgacagtcagagtaatcaagaaatctgtgattgtcttggctagatattcatctctagtggtttgcattgttggtgggattgcaagcttgtacaaccactctggaaatcagtctagcagttcctcagaaaattggacatggtactaccggaggatcctgcaatacctctcctgggcatacatccagaagatgttccaaccggtaagaaggacacatgctccactatgttcatagcaaccttatttataataacaagaagctggaaggaacccagatgcccctcaacagaggaatggatacaaaaaaatgtggtacatttacacaatggagtactactcagctattaaaaagaatgaatttatgaaattcctaggcaaatggttggacctggaggacattatcctgaatgaggtaacccaatcacaaaagaactcaaatgatatgtactcactgataagtggatattagcccagaaacttagaatacccaagatataagttacattttgcaaaacacatgaaactaaagaataacaaagaccaaagtgtggacactttgcccatttttagaattgagagcaaaacacccatggaaggagttacagagacaaagtttggagctgagacaaaaggatggaccttctagagactgccatatccagtgatccatcccataatcagcctccaaacgctgacaccactgcatacactagcaagattttgctgaaaggaccctgatatagctgtctctcgtgagattatgctggggcctagcaaacacagaagtgaatgctcacagtcagctattggatggatcacaggacccccaatggaggagctagagaaaatacccaaggagctaaagggaactgcaaccctataggtggaacaacatataggtgaactaaccagtacccaggagctcttgactctagctgcatgtgtatcaaaagatggcctagtcggccatcactggaaagagaggcccattggacttgtaaactttatatgccccagtacaggggaatgccagggccaaaaagtgggagtgggtgggtaggggagtgggggggagggtatgggggactttgggatagcattggaaatgtaaatgaggaaaatacctaataaaaaagaaaagaaaaatttcctcataggctcacaaaccatggcagcactgttggaaactgtgccctttttgtaataggtatggcttcattggagcaagtgtgtcaccaggggtgggctctgtagtttcagaaattcaacctgggctcaggggcttatttttccttccttctgcctgaggatttaagtgtagaacttttagcccttctccagcccctagcagcctgcactctaccattcttccctctatgacaatagtaaacaaatctctgaagtgtaagggagtccctaattaaatgcctttctttataagagttgccatggtcctagtgatacttctcagcaatagaaactctaacacaccatttcctaagagactctagattctattggtttgataacagtaattattacaagctgtatcttccaggtacacgaatgtttagctgagctatatattagttttttcagtgcatggggcattaaacttggagttctaatgagccagtaaaggagtagaccatgcaaaggtaataagaatagtcacatggttataaaagactccaaagtgttcaattctctccctctccccctcccctcccccctcccaccatctttgtgtgtgtgtgtgtgtgtgtttggtttccataaggttgaaaaagatttaatcggattcagaggacacatacatagcccgtagttaaaaatgcaaaaatgaagtatattcttctaccacaaattcaagcaagaaagaaattactcaaggaaacaaatgggatatgcttactataactggacttggatatgagatattcagaaatggacagagcagttttgaagcttttagctgcatgaatctggatgggaatggtcaacaatgatttctttatcacctgcctcctttcctttcttttgaaagccaccatcctgacctgctcttggcattatctgtttcttctttcttgcttaagcacatatcctgttcatagcctcaccttccttcctctggatctagcttggtttttgcaatttccaaacagtagatcccagctctgttataccacgacaagcatgccaatactatctcctacccaaatcttaaactgaaatttagaaatgagccatgtaggactggacatgctataccagttgagagaacttactgttcttacaaaggacccaagttcagtacttaggacctgttaactagctcataacagcctattattctggttctaggggatatgatggcctctggcctctccagccacctgcatgaatatggtccacatgaacagtggcaagcacatataaattaatcacagaaaacaaacatacaactaacattatacaaactgaacagattacatttagtaatttatttgtgtgtacaagcatatatgtacaaacacacatgcatgcaataacaattaatttaaaaaagactatggatttgaaagagggtgggaaaagatgtataggaggttatagagtaaggaaagggaaggaataatataattatattaatatcaaatgtacgattaaaaaggaaagaaatcgcctcttttggaaggaagacacatttttacttataattaagctctcttacaaactaacacattctacagtattattccctggattaaagctgacaataagatcctgacattcaaaaggcccttgtgacagtaagtaagcagtcacagaatttagaagaaaattagagtatattaaaatatactaaatctccatggtaaaacaaataaccaaatcagagtattttaggctgaaatgacccttttatgactcacagtgaactcttcaactctcaagaacttagtaagaaaacgaaatagagcagtgctgacatcagtcctttgaattgaaatgtaaagtcttgatttgaaacaaaacaaatgtaaactaacaaagctgtaaaccaatataatgcaatcagaaggaagctttctcactaagactccaataccagggatattaccaactctataattacatcatctttaattgtttagttttaatttactgtttctcttatttgattttatcacgatgactgatattttattggaagaagcaaggcaaacatgtaataaaatatagtataataaacagctgttggtttttgttgctattttgacaatataatagatattctgtcatcaaaggtgaaaaattaaaactacccataaaagtttgaaaacacagtataaaaagcatgtttgactgccaggaacttaaacttttgcagtatcttaataaaggtttctattgctataaaaaaaattatagctaaaagcaacttggaaagaaaaggatttatttcagcttatagttcaatattgtggtttaccatggaaagaaatcagggcaagaacttatgcaggaatcaggagacaggaactgatgcagaagccatggagaagtactgctcactggattgctttcatgcctagctaagcctgcttttttatccaattcttctcaaagattctagtttgtatcaagttgataaaaaccaaaccaggctatgcagccatatgtaattcagtgtggaggttctgcaaaaactagaaatagatttatcacaagactcagctatgtaaatgttgaatatttccctgaagcagtctacatctgtatatcatggagatactttacatcaaatttcatcgcagaattattaacaataggtaaatgtcgaaccaagctaaatgtcacaaatgactggatgaagaaaacatgtcactggggaaactggtgctctctttgatgttcttaatccccaaagatttgaaaaccgaatgcagaaagtttatggaaaaaatttattaaagtttgataaaacaatagagcaggcaacctattaatcttgacagttaccccagtaaggttggcaaataagaaaatagaaagtcacaatttttcagttaaggtctagggaagctggcaggtattgcaatcaagattggctagcagctgaatggcagacacatggagaataatttagagagtgagaaatatggcccaggtcactaggaaagctatgcacaggttgtggctactatcaaaagagaagggttgtaacccagaagaggaaaagctatactattttgtgagtttggacttaggaaagtgggcatgccagccttcaaagtgcacaagaagctgcacatatctgcaagagtggatggacttatgggaagaaaaacacattatttctcatcagtagagagattatttctctgtctaaatatatgtagcttggaatgtcagctctcttgccaaggccatggaatcagcaaattccaaatacctacatttcttcatattaaattttaagcactaaagagacatcacactttccagggaaagagaattaaaggccataagacaagggtaccctgtggtctccaaggttactaatatcttttcagctacttagaacacccacaaacacacatggaattttctcatctataaacaaattcaaggagatatagtttggaggcaaaagaatggaaatagaaatcactgtgctaaataaagtaagacagatgtaaaagacaaatagcatatatattctcacacacagaatgtagaatttggtgttcatgtgtgtatatgatttgtgtgtttgtttgtgtgttagtgtatgtcagtgcacatgtgtttgtgtgtgtttgtgcatgtatgtgtgtgttatgtgcatgcatatatttgtgtgtgtgtgtcagtgtattgcatgcatgtgttctgtgtgtgttctcatgtgtaactatatgcgtgtgagtatgtatgtgtatatgtgtgtgtgtatgtgtgtgtgtatgaatgtgtttgtgattgaggtacaagaaacaatgaaaggaaaaaagaaatcttaaggtaaagaagaggaagaggaggtagcaaatatatttgacaaatgaaatcagaaagagagactacttgggatgaaaaaagtgactaccaagcaaaggaacaaagatagagaagagaagattccaaacaaacataatgacatgtgtgtgtgaaaatgatagaagacattgataatttacaaaattaatttgtaaagtacatattctgttctttaataaatttattatgaagacagctctttttaaatataaaaaaccaaaattttaattaatatattaactcaacacactcactctgccaaattttacatgtaaaattatgactctgaaaaagtctgccacttgccttccaacttctatacataatacattgcttgcagggttattaaaaattacatgaatactattccatttggaagaagttacttaattaaggaaatagctcatttgaaattgctgaaaattagaaaaggtgattggctacctagcatcatgagaattatgtcttttggatagtatctcattcttagcatgaaattctaaggaaatgaaataattgttttgcaaactagttactttttaatgcatttattttaattgatgaaggaaaatgtagcattatatacacaacagtaacaaaaacaggcaatacacagtacatactcacgtttttcagcagcttaaaatggaataaggttttcaatgaagagggaactctacaagaaagtaaatatctatgaatttacaagggaaatgtacattcattgcatttctggagggttgatgttggtgttgtcttaactacttttccatttgctgttataaaatatccaacaaaggtaacttaagggaaatggtttggtttggactcataagtccaaggagatacagttttttatagcaagaatggcatggtagcagggatgtgagaccaggtagtcacactgtataaactttcaggaggtggtgaattacaaaacctcaggcccatcccagtgatctaattcttctaaagtgttatggccttcccatacaatggctcctgctggggatcaagtttccaaagatgtgagtgtcaggagacatttcacattcaaatcacatgtgatggtcccatccttttagtgtgtctaaccccagctaatagtgattttgtcttgaagttatagtttgttgataacagagcccaactgacagtacaattagcttttttccttttgtttttgtattctagcttaagtattatttatataaaattgcagatcacttgaaaattgtcatgcctatgagaattctcttacagctgtccttaaaaaaagttgaattggtggcatttcacatgaatatggtaggtttttcctttaattagaacgttgatgtatgcaacttccaataataacttgatagtattgtagcaattgcatttaaacagtttgcattcatagggacagtggtcatttacctctgaattagttatgcgtcccattgctgtgacaaaaatacctacaagagaaaattaaggaagaaagagtttatttttttcagtttgagggctcagtctatcatgggaaggaaagcatggtacagcaggtcatatcatcaatggtcaggaaacaaaatggttaacagctccttccttgctcccctcttttcttatgagttattctctctctctctctcttcctctccctctccctctccccctccctctccctctctgagatatgtatgtgtgggagcccacaggtgctatgccaaagtgtgaaggacagtgcatattttatgggagactgatttcttctcccatcttaaaagcctcagatactgaactgaggttatcttggttggcagcagaagcctttacctagtgaggcatccatcatgctggtccagctttctaatttacttcaatcggttaccgtccatggagtggtgctgcccatatataggatgagtctttccttactgattaagcaattctagaaaactactaaaagatatgtccatattttatctccgaagggactcccagtccagtgatgttaactttataagtgataagcatcatcaccctatcatcaacttgattttccttctatcttgatgtaagtcaaggttgaatgaacttggctcactaaaagtaagattattcttataactttcttcttgtgggcttggatgcttaagaacatggctcatagtgatggagttctctcaaggtttctaccagttccttcttgtttattctaagttcatgaaccttctttgatgtaccatgtagaagctttccctgttatagtcatatgttcatatctatcgttctctataaataaataagtagattctaaataatgagagcataaattcaaacaacattcatcagtaatatgaaagataagatttatgctttaaatgattcaggcttgttatataggcaaagttctcattgttactctaataatgaccacaggaacaaattacatataatctttaccttgggttaatgacttaggaagttctctcacagaataagttggaagtgatagagaaggacacctagttatatgtgcaactatccacatatgggctggcacaccacacagactcacaaataaaataaaaaggaacaaaattcataatattaaactacaaaataacccgtatgtaattttcacaataatctgtcattataaaagcttttaacaaaattgagataaaaagaacattttaaaccagtgtatctaatgccttccacattggtaaagacagagcatgcttccattataatctggactgacagagaatgtgcttatgtcttctacttaaactcttactggaggccccagtcagcccatcaggaaatggggaaaacaattaacagcatgcaaattgtaatggaaatggaaaattattataattcctagctgataaaattctgtatccagaaaatataaaagaatgcccagtgaaattgcttgattctctaaataaacctgccagtgtcacagttacaaaatcagtttaaaaatgaaatgtaaatgagctaaatacctaataaaaaatggaaaaaaaaatgaatctcactttgcatttcagtaggaaatgacctgaaaattaagttatgaaaaataataaattgtttaaggataagattagctaaagatgaacaaaattcagggtcaaagctacagtattttgctgtgacaaattaaaatctatctacaaaaatggaaaactatcccatattcatcaattttaacattccatattgctaaaatgtcagttctatcaaatttgatctctggggttagtgcaattttaatcaaaatttagataaatatccttttgtgagacagaaattggtgaattaaccttaaagttatgtgaagatccaaaggcatacagtagccaacatattttttaagtagaaatgtagaaaacttaccttaactcatatgaaatacgagtataaagatatagtcatcgagatattgtttaatgagacatatgaaccagcaaaatggaattgtaagtatggaataaattgggttttcaaaattaagctagtaatacaagaagttaaaaggtgtttcattaagtattttataagaaaatctcttatgtgaccacttgtaataatgtagatttggactccctttcaacactatttaaaagaatgttgaaagattgataaatagattgataagtgcatgtgtgtgtgtgtgtgtgtgtgtgtgtgtgtgtgtaacacattatatggattgagcagcttgtattcttctattagaaatgtttaataggtttgtacatatctatgttatagtaattaatgaaaaataatgatgactttgacagagagcaaagaggtatatgggaaagtttagaaggaacaagaggcaaggggaaatgatttaaatatattataatctcaataatttaaaatgaaccattgtcttagtcaatggcatattactgtgaggaggcaccataaccaaggcaacacttgcaacacacttcccccaacaatgccccacctactccaacaacgtttcacctcctaatccttctctaatagtactaccctttagttactatgcattcaaatatattgctgttattcttattcaaaccattaaccatacttccatccctgacctccataggcttgtaactgcataataatgggaaatgcatttagttaaaattctgaagattgtgtaatctttcaatctgtttttgtttaaaagtctaaagttcaaagccattttctgagactcatgaccatcttttaattgtaatcctctgtaaatcaatatgaaaaggcagatcacatactttcattatacagtggtacaaaatacacattaccattccaagtaggaggaaaggaagcatagtgaggaaatacaagtccaaagcccagcaagtcaaagtgctcattctgcatctccatgtcagatgtgctctacagacctctgaatccttttgtctgtgtttactccaatacaattctctcacttgggtttgttccacagtccatgtgtacattgccttggcctgtatctcacaaccctggcatctccaacataatccaacctgcacctttacaacttcaaacaatggcacatttaggcctccaggcagggacatgcctaactcatgcctagactcgatggctttccttagtcacagaaggagattccacaacccccttctcagatcctagactctaaagccagaactaagaggtcaaaactgccaagttatgctgcttggtggagttgaaacatagtctttcaattttattttcatcagcttaatgttgttaatgatttcactcactggttgagagatttgttgtcattttattcagaaattggcatcttagctaggtggagtcttcccttgagttcaccactttcttgatccttgatgttttttctcattaaatggtacatttttaatttctttgtccagtttgctccttttcattatacacctgcttaaaagttattactataatcacatgacacagtcaatactaggctgccttgaaatctctatgccaatgccattaatccaaaactcaaattcaacccttaaacatattttagaatgaggacaaaaagcattgttctttgccaacatatcacaagaatggtctctaggcctcttcccaatattgtttgcctctgaaaacccttgattttgaccgtcacactctagatccctctcagtagcactgtagttcaggcttctactaccatagtgcattaattcctgcttaaagcattaaagtcttctactccaaagtgcaagaatgctttgtgttggcttcctgtctgactgctgagtctcatgcttagctagattttctatccatttcagaaactcaactgtccacactgagttcggctcacccatgttaattcactaaggcagtcccccacagataggctcagaggccaaactgatttaggcaattcttaaaaccaggattttttctcccttgactctctctgtcaagttgacagagcaaactaagataatcttcctttctcaagcacatgggttcaagtgaggatggactcaacctgggaaacaataatggaaacaaatctttctattctagagttatttatgtcagacactcagactgttctcacatagttcctgcagaagtcaaatggttcaatttccaaaatggccaggaaagtgtaatagtatgtaatgtacagttatagaaaaaaaaaaaactcatgctacagttttcagttttcattacagcattttttacatgaccaaaaaaaatggacaacccccaatttctatcatttggtgaaaaagttatatatatatatatatatatatatatatatatatatatatatatccggataatatgcatgtcatctatacacatttatatattatatttatttataatgtatactattatataaaattatataaatataatacatataattatatataaatatgatatgtattatatgtgtgtttgatgtttgtatgtatatatattcatgtgtgtatctattatttattatcaatagaatgaaaacaattaatgatgtagtgtacataatacaaatacctccaaatatttttgctgagtaaaagaagtaatatgattcatttcatatgaaatatctgataaaaggacaaatcagttccatgattgtttaaattgtgacaaaagcaaaccagttctggagttgaggagatggttcagttgctaagatgtacactgtgcaatcatgaaaatctgagttctgatacctaatacccacttaagaagtttgacatggtggtccatgcctgtaatgcctgtgcttgggaggaacaatcacaaggatccttctgggactcgctggccaccaagcctccctaaatcaatgagctccaggtttactgagagtccttgtctcannnnnnnnnnnnnnnnnnnnnnnnnnnnnnnnnnnnnnnnnnnnnnnnnnnnnnnnnnnnnnnnnnnnnnnnnnnnnnnnnnnnnagagtgtgtaagagagatagttccataaaattttaatgaagaaagcactttaggaataagttttgcttctgtttgatttaaacctacaatgtctttttaaaatatatatatgtttaatttagaccctgtagctaaaccttctctttggacagaatagaaagaaacatgtagaaagctgtaattagtggagaaaaactttcaactgtttcttttggtatttttttttttaattagcacacttacctattactgaatgtgtgtgtgtgtttgtatttatgagtttgtgtgcatgtgcacacatgctccattgtgcaatggcatatgtctagagctcaggggcacccattcgatgccagttctttctctccctttctctctctctctctctctctctctctctctctctcactctcactctcactctctttgtttctccatcatctagatcgttgggattgaactcaggcttgtgtaaagtgaaaagaaaaacattattgcctaaatactgatcgattctcaagacttcattgtatgtaaataactagtcttcagtggtcccttaacttatatgttgtgagtgtaattagcatagtagcaattctagaaaaaaattaaggggatttgaggaaatcatcatgtaaatacttagaaaaacaaaaattcattttaattaaaaagatgaatttcattattgatgcattaattgcacagtacagtcatgttcacaaattgtgtgaatattaaacatgaatattgttcattgaatatgtagcaggaagatcacattaaaaggaaacataaaaacatacaccatctggttactattctattggtgtggtaacataccctgacaaagtaactgaagggataaagggatgtttgggctcacagaggaagagttctatagttcactgtgatgggaaagatatggcagcaggcaggaatggatttgacatgtacagatgctggctggtcacactgcatctctacttactcaggaagcaaagagggatgccttcactaagttccctttttctatttacactgtccagcaacccagctagagtcttgtgtgggcctgtgtaccaaaggattccattgagatctctggcctggccaggcatgagggttcacacaaagaggaaagagggccataggaaaggggagtcctttccgttgcctctgctgcagctggctccacctctgtctcctcccttgccttggccacctcagttacttcacaccgccctgctctgagtggagccaactagccagcgaggagtgtgggggagcttcaggtggcacttcaggagagcaggcctcttcccaagtgtcagtgttacagctcttatgatggaagctctcacaggacgaagtagttctcacatgcctttattccttctggataggattcttatatacaattttggggtgggacaggaccggacaaaaggtacttctcattggcttggtctgagagcttggagataccttatctgaaggtgagagggcttggtgctgcttctacaggacaggtggccacagacctctctgaggtgttgtggaaggctgtggatacatgagccaggagcccaaggggtgtggccaaatgcctgttgttccttgcaggtgacagtcacctgatgggtgaccagggttttaagcctgagctcgcccagggagcaggctgcctgtcatagctcaccacccacagccttgcagataaagatgggtattctcataccacatatcagtatcaagataaccttccatgggaatgcccagaggctcatattccagctgattgtaagattgtgttgagctgataattaacagtaacttacttatcctcatacactagtaatatattatccttggcttctatttttctgggctctcctccaaccacagggattattagcctaatgaaaacagtcttttccttttacctacattttagtagaaaaagtagaggcagtctagaaaaggcttcctgtgtgatggaggctcacaaattgaccagcaccctgagaagagctaccaccacttggcttgcctttatatgctgaaaactcaattagtcatttttgtggacatgggacttttagctcattttataaatgtgacttaattgatttcaatgtaaatatctttattattaaatttgtcttgttcattttagatcaactactgctagccccacactatactcttctataccatactatagtatactatcatctactatatttatattcattattataaatatttttgatttagcattatgactataattgatacttgtgtaagagaatgtgtatgcatgtgtacatgcaagcacaggtgcatatatgaatacacagtattagctttgtgaaacataatacttaatttgatttgctgggcatggtctctagtgcttcctttaagtgcctgttcttttaagttggaaaaaaaacaaaacaaaaatgatgtcagggcaggcagatcatgaattcctcactaactatttcatttgggatgaggatagaaacaaaaagtataagtggcccagtatagtggtaaacactgtaatactgggttttccatgtggaggtgggaggacaggtgtccaggtcaccttctgataaaggtcaatgtcaaggccacccctttgtggtaaaaggtctgctcccacaagtcaaaacaggaacaaaagaaaagatgaccacatgcaattttaaaaatttccaagtaaaatgtgtccaactgccactaattcaatagctactatctcttttgatttcagagacttaattttagtcctgtgagtatagcttaagaaccagttggaagggaccaccaaatcaaaccgtcatccagtaaaattattctcacagccttcctcaagagacaccacttgctcacagaattatgctagatgctggagctagagagagtagaataagaaatttgtcctcaaggatcaaagctgcatttaatttctttctttctctgcagcaatagcaataaacgtagtaattttccttttaagaattagtaaccatcatattcacttgaatattgagtggcgatgggacttcaatttttagctttatagtcctttcttagtgactgatagtatggatttcagaggcccattaactctacttggtgtccacataagtaatcatgctctccattgtatgaatggattacatttttcataacgacctgcaaatataaaacgttcctttctcttcccattagttattctctctgggcacatgagtgcagaagacataatgaagttccaggaggtttatctattcgagctcaagtaatatctcccaaggtgacattcctaagttaagagaagcagtgggtcttggattggtgttttgcaacacttatgtagatggatattcagacagagcatttcttgtagggacacagaaacacttaacaagcctgatgatgtgctgaacacatggctctgcaggtaaagcactggctgcatggttaacagttggaatttggacctcagcacctacatataacaccacgtatctaccacctattttctcagtggccaggccaactgtcaaacaacactgcctcaatttatctgagtctgtttataaggtggaatcagtttaaaccttcatgtgcacatatatccatatgcacatgcatccacacatgtaaacatgaatcaatataccatacagacatacagataggcaaaaaaatttcaaaaacactaacttttattttattcattactttttacaaacatattctgtcctgcaaatttcttcgattttctactctatagggcacttgcctataaaattttataggaaccttgcctgtatcatgaggactggatgatttttatataaaatattatttctccctgattctcagtctttcttatatattttgggaaacagagaagaaaggtctatggagggtcagttgttctgatcaaattgttcagttgctctgaactattttaccttctgttgctatgataaaaacaacgaccaccaccaccaccaacaaaacatgccaaaagcaacttggtgaggaaagggttgattttagtttacacttccacatcacagtccatcactgaagggagccaaagagggaacctaaagaaagaattgctccctatggcttgctcagctggcttgctttcttatgtagctcaggaataaccgcccataggtggcaactttcatagtggtctgatctttccccacatcaaacattaatcaagaaaatgttcacactacaatctgatggaagcaatttctcagttaaggttactttctccaggtaactttagttagtctagttgtcaaaaactaaccagcacatgcaggctgagtcctgtgtagagaaaagttgatgtatatgatgacgaataaggtaccataaaatgaatctgatgatgatgtgtgggtgactcacgtataccaaagccagtttatagatgtgattattgcacaggaccaggaatctctttcttaatgggctgggggtgtgaattaattttacaaactcagaattatggagaattggttgtgttgtgtggtctgcagatatattgtgaagaaggcaaattaaatgcaacggacatgtgttcaaaattcattatttaaccgattattattgatttgcttccctgtggcatccacattaaaagacaaaattctgaataaagaatgtgttctttctctaattcctaatctacaaagcacaatgtactcttgaaggtaccaagatgctggctttttgtttgtttgtttgtttgttttgtttgtttttggtttttgttttgttttgttttttacaattttcaataaaacttaaagcctatcaaagatcttggggtggcagagaagtatacattttctttaagatggttcttacatgctggtaaatatttgctaaatattcttattttgattacatttttacttattagttatgtgcatgtgtgttagagttcgcatgctgtggtgcatgtaaatgtctgaggacagtgtacaggagccacttctctcagtccactgtgggtccagggaacaagcttaggttgtgaggcacatcggcagatgtctctactcacttaaccatcaggatttccttaacatgatttttaggataatacattttttttatctgtaacttgtaaaagaaacctgatgctgagcaaaacttaggaagcttgtactgtataaaagaatatattttgcttatctaatgaaaagaagaatccagtcaatagtatcacatagtacatttaatatttgattagattagatcttcaaatattcttatgacatacacagaaaaaatactaaaagtgtgaattgatattaatttcctagtttatgataacaaccaaactagacatggatcttaaaataccatattgtatgtggtaaatcaaagttttatttggcaaatactatcaatgaagatgaagtacatcaacaaaatagtggcttatatttatcattgatatgatagacaatggtgggtttaattaattttaaagtgaaagtgtagaagtagtatcataaaatatttacctatatttaaatttagagattattttctcccgtaatgcaattgcctgaatatagagtcaagtttctttccctctttcactctcttttctttgctctccctctttttactctggctccttcctcttccttccaacctccacctgcctgtctatcagtctgtctgtctgtgtctgtctctgtgtgtgtctttctctcagtctctgtctctctgtctctctgtctttgtcttgtgtgtgtctgtctctccatctctgtttctctcctttctctctctctgtctctctctctgtctctgtctctctctgtctctctctctctctctctctctctctctctctgtgtgtgtgtgtgtgtgtgtgtgtgtgtgtgtgtgtgtgtgtgtgtgtgtttattgactctatcttcaggtctgcattattatttggtaagccctttacgcatggatctcatctcattctcatctatctaccttattctccttattgttttttcttatctgtcttatgtgaagcatataagccaaatacatgattttattaagaaaaggtaacttagaagaagattgtatactaaaagacttttatgatatgaaataactaatagttgatgaaaatttacacaatctcttcatatttagtaattagtcaaaagcacaattgtcgtttttgttttaatttatttttatatgtatccttgtgtgaattatgccacatgtatctagtaccaagtcaaaaaaagacatcagatcccttgtagctagaggtacaagtgtcaatgagccaccaaaagtgagtgctagaaatcaaaattggatcctccacaagagcatcaagtgtttccactgatgtggcattattttaaccttccaaaataattaaaaatgcattcatcatcccctggagaataattgaccaagctttccatatgccagccagtgtccttttgctatgtttgtgtcctttcataagttctttctaggagtaatttatctgagtattctgcagccagtctgccacctaacatatccttggaaaatgatcaatagttatacctgtttagtgtgattcaatctgctgggattttcatggttctgagtttggaaggctagggttatgatcaatacatgtgcagctgtagagagtggtaaggacatttgttgctctggcatggatctgagtttaattcccagggctcacaaggtagctcacaattccttgaagctctagttccagggtacccaatgcctacttctggcttctgtgtgctgctgtacacatggggtacacatgagcacacaaaatcccacacataaacgcatgaaaataaatattttattacaaaagaacaatgcatcctagagagagaaagaaaataatggtccctgagggttctttttatttagaaatgaaagcaattgtatgtaaaggatcatgaaactgtgagcaatgcttttatttatacacatgcacatccatagacacacacttgacatataaacatttattcatacacattgcttatatttcctctccgacatatatagaagatagaaattattctattctttaattaatttttttcataacctgactgttgggagaattctttattttgctccctttccttctgatctggtgtgttaaaatataaacactgaaaatccagttatctactcagatgttcctgtcggtgtgcattgtgtctcttgatgaactataacatgaatcagggaaggggtttctaaactgactctagagggcactatcccatctgtcttactggaaacttactctgctcacatacctcagttcagggatgctactgaagtctcccatgatcacatcttaaatttttgttaagtccaattcttcaacttctgggatacattacatatccactctactcaaggttcccatgaaaaagagtcagattctattatgtacctaattctgtgaatagtgggaggagagctgggccagtagtaatgcccatcccaccggggaactaaaacaacttgagctatgaagatgactcagttaaatggtacttgtagcacaagaatgaagggcttgttcttttctcagagaactcatgatgaagaaaagaagtccaagtgtgatgatgttcatgtgtcatcccagggacagggaagtggagatggatgaaatcctgggactcactagacacccagcctagtttatttgtcaagttccaggccagtgagatactttgcttcaaaggcaaactgtacaccgctgaagtaatggtgcctgaagttgtcttctggtctctgcttggatgcaaatacacatgcgtgcacacatgcagacattgcatgtgcgcgcatacacacacacacaaacacacacacacacacatacataagcagctatttattccatcagacaagtttactcattaattaaacataacagactttttataaaatctattgatttatcttgaaagtgtgttgtcttaaccagctgaaaagccaggtttccaatgaggattttctgactctagagagctacactaaaataaatagcactgaggaaccagcacctgacctcctccctctacccattcattctttgattccccaccctcacttccttgagaatcttgaaattcctccagaaaacagatgtacctatctcagcatgcaagtagaaacattagagggatccacagagaggatttcatgtatcatataagatggaacaaaaagttctggcacctcaacttgtaggtctgcaaaaaactgctagagtcctgagcaactataattggtttcagagagttcattacctgtcgacaacagttggacttcatcagtataaagggaggggtctatagctaccaccattacccttgttgacattatatatatgattaaatgatccagcctgggttaccttttgtattttgtattttttttttaatttttattgattctttagagttttacatcatgcacttcagtcccacacatctcctcatcccctcatatccaccctttgccctttcagttgcctcacaaaataaaacacacacacacacacacacacacacacacacacgagagagagagagagagagagagacacacacacaccaagaacaacaactacaacaaacaactgacaactcaaagcatagaaaacatcttattgtagattctgtagtatgtcacagtgtgtccctctctccacttgcaaatgtttattgcaatgagtcatagtctgattctagatctctggcttctgtgacacttatcaatactggttccacatcaatactcctccctgttgtcctgttgttgtcctctgtcattggggattctgcacatttggtacagctgggctcaccctttcagacagcccaactttcccagatgataggctttggagtgggctaatctgatcattggatcttgggtctagatggtagctgagcttgtcagctctctcttatctatagcactaggctgagctctccagcactgctccaacctggctacccaatgtcaccataatttgcaggaagcggggtcacctcttttgttttcatgacctcaggctggctcaccacacccatacctccacagtcagctccattgtgctgcccagtcaaagttcagggcccacttttccaagtgctccaacctgtgtcgggctagaccagctctcctacactctcacacactcagggctggctcacctgtgcctttggcatcagggaaaactccattgtatagcacaggtgaggtgagccagtgcggggaggagagacgtggtggagtcaactttctctaggattccacgtctgggctggctcacttgtgccccctctaccagggccagcttcactactctgcttcccaggtgagatgaaaggcccactctcccaagggttgtagcagtaaaggagcagggctagcttacaagcactcattagcatgggacaagatacagatagtggtggtagggcaccatacatcattcctgtactcatgccactccacagcctatctgtgggcagctttcttaaatccagcgatggtgaagggtgggtggggggcagcaccttttcacccatggcatgctaaggcagatgtgtagcaggtcagctcttccagactcatggccttggggtaggctcaatcatacctctacttgaatttgggattatcacctctccatttcccatgtcaaatcaaacctagatgttattgctggtgccaagaagtgcttgttgacagggcggtgatccagctgtctcctgagaggctcttccagatgctgaccaatacagatggggatgctcacagccaaccatcagactgagcacaggaaccccaatggaggatttaggggaaggtacaaaggagcttaggggggcttatctggcataagtaggaggggaggaccttggttctgtgaaggcttgatgccccagtataaaggaatgctagggcgatgaggcaggagtgggtgggtggggagtacccacttagaagcagggtaaggggggatgggataagggatttgcagagggaaaactgggaaagggaataacatttgcaatgtaaacaaataaagtagccaatttaaaaaaagaacataaaaagactatatttaaaaattaaaaataggttgttgagatggttcattggtgatagaggtatttgtaaaatcctgataatattaattcagttcttgggtgccacagtagaagaagagaacaactatcaaatattgtcccgagacctccacacccatgtcataatacgcacaagcatatacacacacaaagagagataacataacactcaaacacagatcacacacatatatacacacattcaatagaaaagtaataatcattaaaactaaaagtatatagctatcttactatacagtatgaattttgatgtaaaatttatatatccaaaaatgttaggagtatctattctcttctattccgaaggggaaaagctatcaaaataaattatataaaacatcaaaaaccaaaaatagatacaagaacaaatgtcaatatttaacagtagttgaatatttacactaaactaagggaaatggaagattaaagcttaaggaaatgctagtggtgtgggaaagtgttcaatagtcagtcagtagactaccttccatgaggtggaagtccatgagttgtgaagtttctatcacaacagcactacagtttccaaactaattttcatgggaacttatcatatgaacacttaaaagaacattctagcaaaattcataagcatacattttgtgctttttgccttttctagtgctttggtgactgcaaatggacaattaagacaggacagcatattcttagagttgtgttccagctttgtctgacatgtgtgtcttagttacttttctgttactatgacaaaacaccctgacaaaaccaatataagaactgacagagtgactttagctcacagtccaaggcagattgtgctgtggtggggaagtcaaggcagccggatcctgaagcagctggccatgcatgtcccctcagaagacagcaatggatgcatgtcactgctcagatctaatgctccctttcccagcatgtcatcccaaggatggcaccttcccccttcaacaaatgcaatcaagattatccctcccatacatacttagaagataaaaacaaactcttaaaggtgtgcctggagacttgtttactacatgattccagatttggtcaggttaaaaattaaacactagccatattaacataatttgaaaaaataagtatattcaaggaaacagtgtaaaaatggaatataaagttagagctttataaaattatttaacatgggataaagaaattccaaaaaattgtattcaaatttaaaatgtcccaggagccagtgacatagctctgagagagtagagatgattgaagccagcctgatagcctggattctatttcttaaaaggggaaaaataaccaacttgtacaagcatttcctgaactctataggtgccctcagtaagtgcatacctacatacatacacatataacaaaaagaatcaaatatctatatatctatacacatatattagtatattacatatgtataggatatatgtataggtatatatgtatatatgtgtgtattgggacatatatttttttctacatatactatatgtttagacaaacttaaacacttggaaaaccaaagtgatctcattataaagttctagaggtaaacctggcgccatgcaccttattcagtgatgaatggtaatgtatgaaactaaggaataaaattgtatgagaacacttgctatttatcattccatacagtatgattttagattctggtcaattttaaaggcctgctatttagatggtattggctccttaccattacaactaaaacctattttactttaattttatctctgtttaaagaatcaataccttttcagaagttctacaattgcacattgaaattacttttgaagaaaagattacctttcctggcttccttttaaaagactggtttctttagaatgtatgaactcttaaggtctgtgctcctgggtgaattttaaattcattgaagagagattttcaaaaacatgtctcagggtgagtgactctaactgaatagaatctttttatccttatatatctttggacttcaatatttccaagatataaatttgattagtaagattaaacaaacctctgtgtgtatgtttgtgtatgtgtgtgtatgtatgtgtgtgtgtgtgtgtatctgtgtgtgcgatgtatatgtgtgtactaatgtatgtctgtaggaattaaaggacagtattgtctgttggtccttaccttttacctttgagacagagtctctttgttatccagcactgtttactctaggctacacagttgccaagattccaggaattctccagtctctgccacccatattgccataggaatgctttcatggcagacatgtgctaagggtggctggatttacatgaattctgaggatctgacttggctcctaatgcacgtgtggcaagtgtttcattcactgagccatttcccaaactcaatcacaaagtcaatctacaaaagtgtaccagtctaattgaagactttgaaactttggcttctatttaaacttaaaagaccaccctttgcttttctcttaggtgttaggagtttcagttgcttgaaatttgaaagattaaagaatgcatttcaaagcatgcatgtgtgtagaaggactgccaagaacaggggtcaacccagcctttcagtaaagggaagctcattcatcattctgtctctattccgtccttgtccagtttcatcatggaccagggcttcatggcacagagagaatcctgggcatccaaacacggcacatgaacaagcagaaagtgaagtgctggaaagcataaatagacttcacaccctgggcacatatgagaggtttaagctccattatctgtaattgcaattcagagtagaagaatactgtcgagatgaaacatggtttgaatggctttctgtcttagtatgggccacactctgtcacattccatcatggtatacgggagcattttatattcttctatcccaccatcaatgtcacaattgcctgactttttccccgtaactatatcataactatctcataactatctcatctttttccaaaacagtctttcttggatttgtgcttaatgaatatatgttttttttattcactgcagttataaagtatctgacaaaagaaacttaaagaggaagaaaaggtttattttgacatactgttcaaggctacgtttcatcatggcaggaaagatatgatgtcaggaacatgggatagctgtttactatttgtttgtagccaggaatcagagatggtgtagagagaattaaatgctgattgttagctagatttcttcattgtattaagttgaggaccttaaaacattgaatggtgatggccatatatattctatgtttccctacctattttaagccaatatgcacaatctctcacgtgcatgaacactttaacctagataacaggtcacagacatacccagaatattctctgctagaagattctagatcctgcaaagttcacagtcaatattaaccatcacaaatggtcattgtaactattcttataaatgattaagggataaaacaacacaagaagtgacagtgttctggtatatttcatttctgaaaatattttagtttcaaaagactagtaatttcttttcaaaactaagttgttttttgttttttgtttttcatttagggttacattttattttcttattgaaatagataggaaagaattacataccgatccagttacccagagtgaggtaatggctcaatcacccaaataagtttaaaatgttcggcaataagactgttgcttggaactatcattaacacaatgttttgcagtttcatttgtaacttttgttttttgcattcaaaaatttttaattggttattttcttcatttacatttcaaatgctatcccaaaagtctcccatacccttccactcccactacaccccccactcccacttcttgaccctgttgttcccctgtactagggcatataaagtttgtaaaaccaaggggtttctcttcccaatgatggccaactaggccatcttctgctacatatgcagctagagacacgagctctgggggtactggttagttcatactgttgttccacctatagagttgcagacctctttaactccttgggtactttctctagctcctccattgggagccctgtgttccatccaatagctgactctgagcatccacttctgtgtttgccaggccccggcatagcctcacaagagacagctataacagggtcctttcagcaaaatcttgctggggtatgcaatggtgtcagcatttggatgctgattatgggatggatccccaagtgtggcagtctctagatggtccatcctttcgactcagctccaaactttgttctgtaactccttccatgggtgttttgttcccaattctaagaaggggcaaagtgaccacaatttggtctttgttcttcttgagtttcatgtgttttgcaacttgtatcttgtatcttgggtattctaagtttctgggctaacacccacttatcagtgagtagatatcatgtcagttcttttgtggttgggttacctcactcaggatgactcaggttacctccaggtccaaccatttggctaggattttcataaattcattctttttaatagctgagtagtactccaatgtgtaaatgtgccacattttctgtatccattcctctgttcttctgttaagagacacctgggttctttccagcttctggctattataaataaggctgctatgaacagagtggagcatgtgtccttcttaccagttggaacatcttctggatatataccaggagtggtattgtgggatcctctagtagtactatgtccaattttctgaggaatcaccagactgatttccacagtggttgtacaatcttgcaatcccaccaacaatggaagagtgttcctttttctccacatccttgccagcttctgctgtcacctgaatttttgatcttagccattctgactggtgtgaggtagaatctcagggttgttttgatttgcatttccctgatgattaaggatgctgaacatttttcaggtgcttctcagccattaggtattcctcaggtgagaatactttgtttagctcagagccccatttttaatggggttatttgattttcaatgcaatccccatcaaaattccaactcaactgttcaacgaattagaaagggcaatttgcaaattcatctggaataactaaaaacctagggaaacaaaaactcttctcaatgataaaagaacctctggtggaatcatcatgcctgacctaaagctgtactacagagcaattgtgataaaaactgcatggtactggtatagggacagacaagtagaccaatggaataaaattgaagatccagaaatgaacccacacacctatggtcacttgatctttgacaagggagttaaaaccatccagtggtaaaaagacagcattttcaacaaatggtgctggggaaactggcagttatcatgaagaagaattagaagaattctaattgatccattcctatctcattgtactaaggtcaaatataagtggatcaagggcctccacataaaaccagaggcagtgaaacttatagaggagaaagtggggaaaagcctcgaagatatgggcacaggggaaaaattcctgaataggtttgtgctataagatcaagaatcaacaaatgggacctcataaaattgcaaagcttctgtaaggcaaaagacactgtcaataagacaaaaaggccacgaacagattgggaaaggatctttaccaatcctaaatcagatagggactaatattcaaaactaagttttatttctttatcaagtctaaacatcaacatacatgaaaacactatataaatgagaggaagattataatgttgatgaatgtgtgagttataaatgtgaactcttaataagattttattgagcaatacagtggtgacattatgcaagatcaaaggcattggctttcagtgttgtggccaacactggcataggatacagggaaccactgggcacaaatggactctaccaagtattctatgacatttgtttacttatctatttatacattttggtttgatgcatatgtatatgcatggcttatgtgtgacattgtgcataggtaaatgttacaaagaagacaactttcaagaagtcaattttctatatttgtatgtgggttcctgggattgaattcaggttcttaggcatctcaggcaagagtgtaatctgctgagctatctcccagccagggaagtattccaatagcagtaaatatctaaatacctattatgtcattcccaggagatgcatgtcctgccattcatgtaaatattgacatatgtattagatattgtccttgctgctgtcacaagtgatacctgagaacaatcaatttagagaaggttctgtttcaggcttcagactcggagatacagttcactgtgacaatgagtaatggcagtggaaactaaaaacatgaaaatcggaaacagagggtgaacccaaagtgaaacttgactatagaacacagtgacccacttcctacaagttttcacttcctgcaggctccacaaacatttcccaaaagtttctcaatcttgagacaaggtattcaaacatgagcctgtggaggtcattatatgttgaaaacacagtaggggagacctgctggtatgtctttggtatttgaaacactgcagacaagacagaatggtttcaggagaggaggagagtacaaaaagactcatcagaggtgaagctgttctattactgcttttgcttattgggagaggctcctctctcataaattgaagatacataaaactgggtctgtattttactctaaatattttttgaatttgtgtatgtgtgtgtaggagaatatgtgcatatacatgtagatgtgtacagaggacagatggaatgggggttctagaccaaacaggggtcttctgcaagaccagtaagctctcttaactccttgcccccacaaatatttcatttttataacatcatcttgcatttataactttattcatcatctttccttctaacattgcctttactatttttttcctcatgatagaaccactgttatgagccatagttctgagacaaagggtagctcttcagtaaattttgccatcattctaactttacttattgctatcaatctttgattctattgcatgcctacattactttggtatgttctcctttgagaacactagccatgagaatcttaatcagaatagctctgatcattcacaagaagtcttcaggatctgagcttctagacaaggtcaaggatctaagctctatctcaaactacatcagatgtggtggtgaggctcacctctgaccccagcagtctggaaatggaggcaggaagaacaaaagttcaaggtcattattgcctacatagtgattttgagcttccatctcagaagaagaataagaatgcatgaggaaacaaaaagaaattgaatagggaatacctaatgtacaacttgctaacaaaatagggccaattctctagtgtctccttgtaccttgattctaaggagcttatcatcttagttagaccgtgaaaccagtttcatttcttgaaatgagccattaaggtttgaagtctggataattttccttttattgctcaatcttcttggaaacattccccatcttggatgtttaggctgcttcctttcatgtctcctggacagtggggtatgtctatttggttgcccactctgaactccctattttgtatatacacatatatgttatgtgactatgtggcatcatttgtataacatatattatttactattcataaagtagtaatggtttaagtgtttactaattggttttttttttttttttttttttttttttgccaaaaagtatactctacatatggggaaacagaagccaggaaataaaactcaccacaagattcacaatagatagacgataaaattaattttataataagaaagaataacatcagaatctctaacattttccaactaaaaacatcgaactaaaactacatatcaattttcaaatacatacctcagaaacaaaataggtgaaatcagttttaatacagtttatcaagttttgcatatttaaaaacataaacaatataaatgcagagtaatgacttatttagttgggtattatatttaaaaatattaaatgagttttaagatgagatgctgggaattaaacttcagagtcatgcatgttattcagacattctactactgaggaataccccagccccccaaaaagagtatttttcagaaaacagatctcagtcaaggttaacatacatttaaaactgttgcttttacctgtttatgaaaattactattagctttttaactcttctattaaaaggttgacttgtttcaatgttaactcatgtttctatccataggatatagacaaatgattgatacacaggagtaaacaataagagttatgtgatgtgtgctgctggaagattgccacacttcagtgcacagagatttatggatacacatttttcagcagcattgagttgactcaatattgagtgattcaaagttcttgtgtatgtttctaaaaaggcatctgattttctactgtacaggtcctagtgaggcagaagacaaaacgaacttgcttgtagcccttgcagaggctgctggtgttactacttgaaaaaaatctatagttgataactagtgtggcaaaacatgcttgttgttctatgactagagtattagatgcagagacatcatagactataagccagccaggtttatgtttttaataggtgcaccaacagaattttatttagccataatgttgtagatttatatgtaatgttaaaaaacggtaatgctgtaaattatgtaaaatacatgcaaataaataattattaatcattttgtttacatttcaaattatattccccctccagattacctttccaaaaattccccatgctatcccgcctctccctctcccctttgactctgtaagggtgctcctccatctacttactcacactcacctcaccactctagcatccccctctgctggggcatcaagcctccacatgaccaaggacctccccttccattatggcagataaggtcatcctttgctgcatatgtatctggagccatggattcccaccatgtaaactctttggttggtggtttattccctgcgaactcagagttgtccagttagttgatattattcttcctatagagttgcaattcccttcagcttcttcagttcctcccctagttcttccattggggtctccgggctcagtcaggtggttggctgtgagtatctgcagagatttgggcaggtgctggtagaacctctgagggaatagccataccaggcttcttggcatcagcaatagtgtggggttttgctctggatggtctttctttcagtctctgttccatttttttttcttttttaatacttttattaggtaatttcctcatttacatttccaatgctatcccaaaagtctcccatacccccccattcccctactcacccactcccactttttggccctggcattcccctgtactgggacatataaagtttgcatgacaaatgggtctctctttccagtgatggccaactaggccatcttttgatacatatgcagctagagacaagagctccggggtactggttagttcatattgttgttccacctatagggttgcagatccctttagctccttgggtactttctctagctcctccattgggggtcctgtgattaatccaatagctgactgtgagcattcacttctgtgtttgctaggccccagcataatctcacaagagacagctatatcagggtcctttcagcaaaatcttgcttgtgtatgcaatggtgtcaatgtttggaggcttattatgggatggatccctggatatggcaatctctagatggtccatccttttgtctcagctccaaactttgtctctgtaactccttccatgggtcttttgttcccaattctaagaaggggcaaagtgtccacactttggtcttcattcttcttgagtttcatgtgtttcacaaattttatccctgtctttcctatggacaggaacattttctgggttaaaaattttgagatgggagagtggcccaattcctcaactgggggtcatgcctatctactggaggtggtctctaaaggttgtgtctccttttctttggttatttcagctaatgtcatcactgttgggtcccgggatactcttgcttccctggagtctggtactttctagtggctatcccctagttccccatccaccactgctacatatttctattcaatttcctggcactctgtacttcttttctttcaattccactacctgattctgcccccttttaccttctctgtcccaggtccctccttctaaagcccatgattatttgttccatgttctatgtaggattagaacatctacaatttggtcttccttcttcttaagctccatatggtttatgggttgtatcataggtattctcagtttgggactcatatccactaattgagtgcatatcatgtgttctcttttgtgtctgggttacctcactcaggatattttctagttccatcgatttgcctgtgaatttcatgaagacattgtttttaatagctgagtagtaatccattgtgtaaatggatcacattttcttttttttaaatatatattacatattgtctttatttacttttcaaatatcctgaaagttccctgtaccctcccctctgccctgctcccctacccacccactcccacttcttggccctggtgttcccctgtactggggcatataaattttgcaagaccaagggacctctctttccaatgctggctgactaggccatcttctcctacatatgcagctagagacatgagttctgggggtactgattagttcatattgttgttccaccaacagggttgcagatcccttcagctccttgggtactttctctagctcctccattgggggccctgtgttccatccaatagctgactgtgagcattcatgtctttatttgtcaggcactggcatagcctgatacgagacagctatatcagcgtcctttcagtgaactcttggtggcatatgcaatagtgtctgggcttggtggctgattatgggatggattcctgggggggtgggtaagtctctagatggtccaccctttcgtcttagctccaaactttttctctggaacttcttccataggtattttcttccctattctaaggaggaatgaagtatccatacattggtcttccttcttcttgattttcttgtgttttatatattatatcttgggtattccaagtttctgggctaatatccactatcagtgagtttatatcaagtgacttcttttgtgattgggttacctcactcaggatgatattctccagatactgtatccattcttctgttgaggggcatctggattgattccagcttctggctattaccaataagactactataaacatattggagcatgtgtccttgtaatatatttgagcatcttttgggtatacacccaggagtggtgtagttgtgtcttcaggtaaaactacttcaacttttctgaggaactgctgtattgatttccgaagtgattttaacagcttacagtcccaccagcaatgaaggagtgtttctctttctccatatccttaccagcatctgctaccacctgcattttttatcttagccattctgattggtgtgaggtagaatctctgggtcatttttgatttgcatttccctgatgattaagaatgttgaacattgatttgtgcttctcagccatttaagatttctcagttgagaattctttgtttagctctgtaccccactttaatagggttacttggttctgtgaattcaatttctttagttcttcatgtattttgtatattcaccctctatcagatatagctttagcaaataacttttccaaactgtgggttggcattttgtcctattgacaatgttctttgcattacagaaacttttcagttttatgaggttccatttttcaattgttgatcttagctcatgagacatttgtgctctgttcatgaaatttccccctgggccaatgtgttcaaggctctttcacactttctcttctactaaatgcagtgtatctggctctttgtggaggtccttgatccacttgaactttagctttgttcaagcagataagaatgggtctatttgcattcttctacctgttgacccgaccttcagttgaatgagtatcattttttgaaagtgctgtcttttttttttcaatgtatagttttggcttcactgtcaaaaaatcaagtgaccatagttgtgtgagtttatttctaggtcttcaattttattcaactgatctacctgcctgtctctgtaccaatatcatgtggtttctatcactattgttctgtagtaagatttacccctctcctttaaaaaagggaaaagactgaaaacaaaaccagaaaatcaaataagcccattgaaaaatggggctcagaactgaacaaagaattctaacctgaggaatactgaatggcagagaagcacctgaaaaaatgttcaacatccttaatcatcagggaaatccaactcaaaacaaccctgagattccacctcacaccagtcagaatggctaagataaaaaattccggtgacagcacatgctggcaaggatgtggagaaagaggaacactcctccattattggtgggattgcaagcttgtacaaccactctggaaatcagtctggcagttcctcagaaaattggacatagtactactggagggtcccacaatacctctcctgggcatatatccagaagatgttccaactagtaaaaaaagaaaaattctccactatgctcatagcagccttatttataatagccagaagctggaaagaacccagatgcccctcaacaaaggaatggatacagaaaatgtggtacatttacacaatggagtactactcagctattaaaaagaatgaatttatgaaattcctaggcaaatggatggacctggaaggcatcatcctgagtgaggtaacccaatcacaaaggaactcacacaatatatactcactgataagtggatattagcccagaaacttaggatacacaagatataagatacaatttgctaaacgcatgaaactcaagaagaacgaagaccaaagtgtggacactttgcccattcttagaattgggaacaaaagacccatgtaaggagttacagagacaaagtttggagctgtgactaaaggatggactatctagagactgccatatccggggatccatcccataatcagcttccaaacgctgacaccactagcaagattttgctgaaaggacccagatagagctgtctcttgtgagattatgctggggcctagcaaacacagaagtgaatgctcacagtcagctattggatggatcacaggacccccaatggaggagctagagaaagtacccaaggagctaaagggaactgcaaccctataggtggaacaacaatatgaactaaccagtaccctggagctcttgtctctagctgcatatgtatcaaaagatggcctagttggacatcactggaaagggaggcccattggacttacaaactttatatgccccagtataggggaattccagggccaaaaattaggattgggtgggtaggggactgggggggggagggtatggggtacttttgggatagcattggaaatgtaaatgaggaaaatacctaattaaaacatatatatatatatatatatatatatatatatatatatatacatatatatatatatgtgtgtgtgtatatgtatatatgtatatatatgaaagtatgtaaattctgtggatataatcatatccactaatactaccttttagcaaatctgaaaaacatagtctagaatgttctcaaatgtctctcccttttattacagaatcatctcttctgttactattcatttggtagaaatagcccatagtaagtagtgaaatgccatgtttgggctgagttcttttgtcccttatgcagaatagatacctggaaagtcattcacttgatttattgaagccagagttggtaatctcaactcatgcaggtgttgattatttatttgaaaaccgaaccaacttgctttcaactgggacaagccgggacagttccttcagatgaactccattatagtcaaattgttccatctgttttccctgaatgaaagaaacctcccttgctgctagtcagagaagaagggctccttgactcaggaccagatgcaggctgtattgcgctgcagaccaattacagtcttggcagcctgtgaggctcatggggtgaaaatttttttatagcaattatcaatatcagccaatttctgagaatgggcagaaataagcagtcatggctccaggatgagttttctatcttccaaaggctctctggctgactgccatggagaacatacaggagaacatacaggttgacatttcatgtgacacaggaaacttacttcatatttcttacctacttctactgtgcttgtttggggttggttaaccattgtagatggaatattggaataggatagtatttcagtgatatatggccacctatcttccaggtggaatttcattttccatgcagaatcccacatgtgtaagtctctgtataagtgttacccgtagtctctatgtacatcttctagagtgacttatgtgttggcatattacttatttctctaatagaactgtggatgagggaagacttcagagatggttcagtggttacaagtggctacagtggttactactgttcttgcaaaggaccaagtatagtttccttcatccacaatgtttcagtttacaacagcctttacctccagctccagggttcctgatgccctattctggcttgatggatacctgcacacctgggcacatgcctccccctcccctcccagcacacatatacacgtcattttaaataatataaatcttaaagagatatgcatggtgaagaaagagagcatcataatgatgagctggaagttaacgtaaacctggagtggctggttgaattagttctgttgtttgtgtgttggggttgaagattctgggaggagtagagttggaatttatggtgctatgtggtaatattgtgtccttgaacattgaaatgtcaaatcttatcattatctagcaatttctacaatttgtgacctcaggtggatcagcctgcaaggaaaatgcctattacaaatatatcttattttattatccacagagtgtctgtaatataaaagaagaattcgcctaagttgtcatggggcagctaggtaatttttaaattaaatttaaaataaggttttccttttctcaaaatttgaaacttagtacaagttttctttgaaatccaaaagagacagagtgtatgtaagaaaataagaagctcagggttaccaacatcccttccatctcatagtgagcacctaccatagttagtcaattaaaccagggttagaggacaacagaggttgcaaggatctttgtctcttgagccagagattctgaggccataagaacaagtcatggtctgaccacaaccttgaacacagtgatccttcatgtaaggaattgacttgttttgcaaaattatagtcaataaatattgattgtcttccaagaagctaacaaactccttgaatataaattatacttggaaagatgtttaagaattatagctataatttctaaaataatctatcactagccaaacaaacaaggatctggagagatgttgcagtcagtgattgaaaacacttgccgatattgcagacctacctcctacacaaattcactaacactgaactaaaaatagactcacctcttttagaaaatgttagctctatcattaatcacactttgaatctgaaatcaacttaaaagtactcttcatagaaaatgtaaatctcacaaaactctacttataaaatttttggttacgttcaatctctatagaatattcattaattataaacataattactagcatgtcttatcctactcttgttacttgagagactggtcattgattaataaattaagaaatgctaaattatccactatgcatgttacacactagagtgtgcctagccaataagaataacataaaatagtgtttaacaatctaccagatgtttattattttatgtagtctaagcataacaaaacccacaagtatggtgtaaacctggggcttaataaaaacaataatgacagcatgtttgtctataatggagataagattttaatttattttttaatgaaaactagtgtagttttttagaaattagtgtttttatcacttaaagtctttatacccaggaaagggattttcgcaaagtaacagagtaggaagcaccagagatttctctctacgcagaagaaaattgcatttatggattgtctgagaaggcattttgcaacttgggaagctatctaaagcttgctatttctaaaagataatgtaaatggagaattatagttaatatcaatccacttaagctctagtgcagtagcagcttatcctcctcagactctagccaacctagacgctttcctgaagcttaaaatcatggtggacaaatgtctatatttgaatacatatacacattccaaattccaggcttgggtactcttatcattggtagtcgtttttgataagtaaaatgatgattatggtgttactccagatgtccaataattcttccaagtcactgtctaatttttttttgtacgtgcactaggggttgagcctacactgacagatctgcttcttgttcctccctgtctcctaccctggagtattcagatagtggcctcaccttccctaatggagctgccaaaacctgactttttcgctagaacacggataacaagagtggtacaagggagggatctttactttgtctcatagtttcagagatgtcagtccctcaagggagtgtgtccatgcaggtgtggatgaacttatattcaggaagagacagaagtagaacatagaaagaggccacagcaaattatctcctacaaggacacacccaaaataatttccttctaccaggtgctctccagctcctgccttctgtatatgccatcctaatgtgactctacaaatgcactaactatatgagagtccacacgatcgttttctagagattccattgcagacatttgttttcaaagctgagctttgctagccttctaggccatcaattcaagcaaagtatgggtaaaaactaacaactatactgccttgatgtgaataagtgcacatgcacagccaatcatgcacacataccctggggtagcacggacttataaactcaatttctcagaaagctcccatgttcatgatccgtgtgggcaacttagtaaaatcctgtctgtggtctcaagaccaaccatttttgaagcatatgtgatgctctagattctgttactagcactgaaaacaacagcagtgaaaatccatggaaaatccatctgatagcaacaactgagcaactcattctctgtgatgagagtgaatcaggaaggctaaccttcctccattctattcagagtggctttgtgagtttctaatgaaggaaagcagcactggccaagaaataaaagccgttcaatcagaaactgcaacaattatctgtgtgtacaaatgataggaacgtacatatttacaactctgaaaatagaacagaattttcttgggactaattttaaatatgagtaaagttggacaaaagaaagtccacacaaaatcgtctgcatttctaactactatccaagaataagttcaaagtgataacaaaatcattccacaaataagagacccaaaagatgaaaatagttttttttataccacaccaagaaaatatagttttattatgtgtgtgtgtggcatgcattttatacatgtttatggtgtgtgcatagtacatgcatatgagtatggatattcatgcttctctgtgcatgcatgttggtaccagaggaggacattgcctaccacattcctttggaacagggtcatgcattgaactggaagtgtgacaccagctagacttgcagtcagggtctcttattcttcaatactaaggttataggactatgcagccatgcacatcattatatatgggtgatgggcattcaaattaaggttttcatgctttgtagtgttaatgttcttatctactgattcacctctccagcccaaaaaaagattaaactactaaagaaaaggaaaaatgtgtgcactgaaaagtacaaaaccttcatgagagaaatcaaaagcaacataaggaaggaaaaacatgttattttatgaattggaagaccatgctttagaatatggattatttacataagatgtggattatttacaaagcaatacacaaattgatacagtttgtcaaatttcaacaatgctcttttcctttttatacaagcaagcttgccctaaatgtgtatacctgaaatgtacatggcatctccaaaacatgtcaaaataactctgaaaagaaatataagagtagaagaccccttcttactcattttaaaactcagaaataatgtaaactgctgttctctgagcatgacatgactctttcatacatgatctcaggtcatcatacatctcctatacaaaacctgcaagagataaagcccatgagatttccagcgtggagcaaattcctatccttggctgaagagaggctggcagccttgtgacttctggggagagagagagtgaattttctttgggatgtggccactggcaggccgcccatgagccagtggataactcacacccatgtgcatatgggcagtgctaattggactcagtgggttatttaaaacataaagaaagcagcagacatgaagctgggaacacaatctactgggagaaggccaggaattggagggagcgagtgatggatgaaaatgattaacatgccttgtatgtacctatgacattttctaagcataaagtttaaagcccttaagattctgatcataaagcttgagtaattgagatcactggatagtgaaactcaaagccaatgggaaaggatggagaagtacaaaatgaactgaagatccccctccttcagaacaaggtagtctttctagaacatggcattaggagaactggggatttgtatgaagcaagatgcttcctcacctaagaccctgcataaaagctaacaggaagcaatctatgacctcagtgcaatctatgacctcagtgcaatctatgacctcagtgcaatctatgacctcagtgtaagtttaaaaactgtcaaactcctatatgaaaatgcaagatcaatgctttaagatatacaattggcaatttcattaattatatatagtggcaaagacactagaaaaaaatatcatgctgacctatgaaaacaaaataaaatatgtgttaaatgtaattaacaggggatgaagggatagcttagcaattaagaatgccttctgctctttcagaggagaagacttcagttcctcatggtgtcagagatttcaaagttacttttaactcaatcttctggcttctgctaatactgcactaatgtttgcatatcatacccacagggaagtaaatataaggtaaacttaattataaaatactaaaagagtaatcaaacaaaacacaggaagacattttgtatattaagagatttaaaatattaataggaaggcatcatccagggaactggaacaaggatttagcagtgaataccactggtagttcttccaaagtatccaggttcaattctcagcacacgcatggctggataaagtcaacttttcaagatgaaaagagtttgccaatgggttatggtgagagttattaagcaatgtaattctacttactatcacaggtttacgtttgtgctctaccacaaaaagtgggatatattgagaaacaaggttcaaatgggagggagaataaaagagataaataggggtgaaaatgtctgaaattcatgaaacagacaaaatgaattggcctgaaatgcacataattcttttaactaaacatgcatgtgattcttgatcaaatataattcacagagccttaatagaatgaccccagtctcctgctcttatttggtcccatacagtggctcaacccattacgctgaccttgagaggtgactttgttctagtccagcagaacagacttgattcttcttgaggtgttcttgcactctggtctcttgtgataccgagaaactcatagctgagcctgacaggtcaggctgcattagagcttgccctgttcagaacttacttattatccacaaggcaacaaatgttagtactataagtgttgtgttttataaaaagataaggagagaaagaatatgtttggtggatgtgtagtcaggtgtgagggaaagtgtgcctctgtgggcccatgctgaggcatcccttctccctgagggaccagccacacaaggcagtattatatagaatggagtttattcagggtatgatgaggggaggtgagagggtagtagagacacagaaacacacatagagagagaaagagtagaggagtagaggtcagccatgagcatgtagagtgatagagggaagcagtaaaaggacagagcaggagcaagaaggcgagagagggggggggaggagagggacaggaggtaagcagccccttttaccttttatagtgagtcaagcaactgtggggcagaagcttagacaaaatgctaacaataagaatgggcaggagccagactgatttccagagtggttgtacaaacttgcaatcccaccgacagtggaggagtgttcctctttctccacatcctcgccagcatctgctgtcacctgaattttttatcttagccattctgactggtatgaggtggaatctcagggttgttttgatttgcatttccctgataattaaggatgttgagcattttttcaggtgcttctctgccattcggtattcctccggtgagaattctttgttcaattctgagccccattttttaatggggttatttgattttctggagtccaccctcttcagttctttatatatattggatattagtcccctatctgatcaaaagatggcctagtcggccatcactggaaagagaggcccatcggacacacaaactttatatgccccagtacaggggaacgccaggtccaaaaaaaaaatgagaatgggtgggtagggaagtgggggggagggtatgggggacttttgggatagcattggaaatgtcattgaggaaaatacgtaataaaaaaatgaattacaaataaaattaaattaaaaagaaatgaaagagaaaaaaaaaaaaaaaaaagaatggtcaggagctgtcctctcctacttctcctatgttaccaatgaaagccaaatgagatacatgttagaaggatctgaatcccctagagtccattttaactcttttttttcttttttagaaattttctttatttacattcatatgttatcccctttcccagttgccctctgatagtcccctcccttttcacccctcctctccctctgctcaccaacccacccacctctgcttcctggccctggcattccccatttctgacttctattgaatctttcccctgtaagaataacatttctacctttattttaatcatatgataccagaaagtttcaattatgttggatgttctttttcagtagataaaggataatttagtcaataaggacttggtgtgcaagcttgagattttaagttcaaatcccctacattcaaacaaaaagccagaaacacacttgtaatcctactttgggaaggcagaggcaggatgtacactgagattctctgccagccaatgaagatcagtattgtgataataaaataaagtaaatgcaaatttataggcagatgtcttctcctggtattgacaaatgccactcactcccaaacaaaagtgccccagccttattttcttccagattagcttgccatgtgactctttcttcttgtatttcctaggtccatggaaaacatttagcaattagttcattgagatcaaggcatccagtgcactagcttgctacatctttgttctgtcagaacaggtggcctaaaacaaagcccctttgtatagttctgacatcatactgagtctgcagagacagttacctcctattttatcgaagcttcctgctgtgtcccagggagaacatgaggaagttagcatacaggataagcaaggcaggacatgcagcctggacctcttctctacctaaagatttggatagcaaataccatgttttagaagatatgcagggggaggggttgtctttgtgatgcggatacataatgttcaggcgaatgtgcaccatatcatgttttctaaagcaggaggagaggaaagagacagaaatcaaatgcctaaaaataacatctgttttctctgtttccttaacctcccttcaacccagagaagtaaaaaggcagcaacagtttaactgggctgatctgtcgggtccaggtctgtggctcttgcatagaagtgagcaagtcgccgtctgtgcagacaggtggctagaattaagtgggatacagaagattggagaaacagaatgcaaatttaggaaaagtcagcacatgtttagcaaaagggaagatgaaacttgaggtgagtatggaagcagctctcagcatgcatcacagtccactgaactagctgtcagaaacatgttcaaccccagtgagagaaagcaccagttctcttgtgtccccatgatggactactaaaggtcaaccaaggccactttgttagattgtatcataacaatgaataattcactcatttatgccgtgtgattaacagtgattttttttttttagcttcttaaagcgttgtattaaaaagctaaaagcaggcagaacccatatacacaaagcttggtgtggtgatgcaaatctccaatttcagaactggggaggaggaggcagatggatccgtggagctttctgatgagttctaaatataggacagactcaaaaaatggtggccaacaacaagaatgatacttgaggtttaactttggcatccaccatccacatgcatgcgttgcacgtacctgaacacatcctcggagctctgtagaaaggccacaggtgcatgggtagaaggaaacaatgtcagcatcactgaattgccagtgttccaaaggcttattgatttgggattctaatccaagagttttaactcttattcctgcaataggaactaaaggggctaaagaatctctggaaagtttcctgattgggtcagataccttgaatattgttttggtaagtctgggttaaatcataaaggcccaattttctcatcccagaaccacatactgtgtagttattcaaagcaatattatgcagattttgtgtccattgtgataacatttgatccttaagatatttggagcttgtaattttttttttcagtgttcaaatgagaaaaaaaatgtagccccaaaattaattattgacatttagaaggttcataggtcaactggaatcaagaagaacaatactgcttctttcactattatatgtttacataaggatatacagtaatacatttttcactgtttagagagaatgcatagactgggtgaattatgaacttgcctgtagaatttggtaagaaaaatttagttaatcatgatcaaatgtaagatgatggaaaagtttaaggaaaacaaccacatcttactgcattttttggctggcaaggtggctcattgtgtaaaggtattcgctgccaagactgattacccacatctagactcagagacccgcatagcaagaaagatctgactccctcagattctcccttgtcttgcacacttacagtaccagtgcacgatgtttctcctctacaaatgtaataataatatattatatataaaaatataaatgatatttgtgaatttttaatactctaaaaatatataattttgcattctcacaagaaatgatggaatgtaaatagaagacttaaaggttaaccttatttgcataactctcccataatatatattgaaccttgtcaagtctgataagtctatcccaatgaaagactggaagattcacaggagagccttagtccttccaatgcttacaaatttgtcttctcaataaactcagactaatctgctgctagctcacatctctccccttcagtagaatgagctcctgactgcacatcctggcaaaggcctgtatttctcctggcatgtatctcctgtctgtacacaaagtcctgagatttcatgcaaaagccttttctccaagagatacatgacttgagtagatgacaggtggcaggaccccagatgcacttcacaagacaattctaaaactgttatggtcttctgtagtcttgttttccatgggaggtcttgacctagagactcacatacttataagtcaattatactaaagtttcccatgtgagagaatggtaacttacggtgtatagaggaactgctttagtttcaatcaacaaaccttttagaaacaataacactgtaccacatgcgtagatatactgtctagctcctactccagctttgtttgtttgtttggatatttttcatccagaaaataatttttcagaaattggcacacattgaccacctcttcagtccttggcccaaatgaatgttgtgtgactgttgttacacttattaccttggtttccacgaaatgatggattgtctgtcaccattggaattatgaaccaaataatctgtttccttctctctgttattttgagatataagggtttttttttaaatagtaacagaaatgaaacgagaccacagcagttcaggaaagtacccagcattggtgaactcaagcttccacacacatgcctagcggtgcctactcactcacaaatgcacaggcatgggacacatgcatatatgccccctgtccaaatcagatagcttagaagtgaaaataaataaaaggctacagtgtctccaggttatgggggcatcttctaatcaagcgaaaggccgactactgacaaaatgattttagttagatggtactatggattcattctggcgtcaccctcaagccatgcacacctacattttattgatctatactacagttgttcagggggttaaacctttccatctcagaacatctggtacttacaaaagactcatatcatttcaccttacttcctatccagaaatagaacacatggacactgccttagccatgccttctagcagaccaatttccttttcaaagtagaacctttcctcatggctgcttgtactcagttatattacatcccagacagaagaaagagcaaaactaaacctaccaagggactgtggtttttggtttatttgttttcttctcttactcaactgaactttgatagcattcaaaacttaaagcagtaaaagaaagcttaagaaataattcttgtccccccaaaatatattactgtccaaaattactaagttattcaaacttagccgtaaatctagctatagtttcattattattattttgatgttgagtagatgtgtgcatgggagacatggacatgtttgtgtgcatgagtaccatgcaggcatattcattcatctacacttgagaccagaagagagcatcatctgttccactctgtcattcttcacctcactgcttggagcatggtctctcatgaaacctggagtgttttcatgctaaacttgtgcagccagcaaccctagggagtcatcctgttcctgattccctggagttaaagacatgcatgggtctcaggatccaaactcctgtcctcctgcctgcgcaacaagtgcatctaaccattgatccatatttcactctaatccctatttaccatttttcaatattggtaactgtcttttaaccattttttttcagaaagtatttctgctcttcatcttatggtccaattatctttgagaatttgaattttaatcattcttgttgtcacttctttccaagttttttttttaatcaatgcagcatttcctccaatttattcaactaaatcaattttctgttcaattacgtcttaccttatgatttaattacatacttgttggggtgcagtgatcaattttgctctttagagatttaattgaaatactcagaaattgataaatgaatgtcattatgcatttgaagactcacagcatctgttgtttaaaagtgtgaattaatttgtcagacaacagagccttcacagctactttatatacttatattcacaactttagaggcagtcttttcttctttgcctttcatagatcaccatgttttcctcttctatattcaataatatatttcaatatatctttctttaagaagtattctggtccatgtgatttggtagtgtcacagataagaaatagccaatggaaagttgtatgaacaagtgtttatgcttgtcagattatggtgactgtggaggccagagtttgatggcaggtgttgtcttcaatagttttggagactaaaactctcactgggtttacagctgtctgattttactagtttatctctgaccagtcagccttagggatcctcttgtctgagcctctatagcattgagttacagatgcaaggtacacctaggtatgtggtttctgagaatcaaattgatgtactcatgatgggtagtttcttagctaagccatcttccatggtcactatttctgcctattcttctttaaactgtgctcatgtgagtacatagtgttatgctttcaacacatacatgggagaattgtaaggacagtcatatgcctaatctctattttaatctgttacgccattgtgtgaatcaacacaggcttttcacatactaaacacatgctttaccactgagctattcctctagccccaaatgcataatttcaaaattattgtgtgacattgaaattccttgtgataagaaatgcatatttttaaaggaaacacattaaaagcttttattttgccttgatatgtttgtattatacagtctttgctgcagtgattatacatttctttaataaaagtagtgtcctagatcccatatacttttttctttttcattttgggtgtgttaatgctataaatgttgagactgtgcttaaagtgtgcttaagggactaaagaggtagaacagtaggcaagagcaagtgctgtgtttacatgaaggtgtgaacttgaatccctagcatgaaataagttagaccaggctgcatgtgttcataaccccagagtgtggtgtgaaatgaaatcacgagtgtcactggggcttactgtattccactgtcacaggttcaagtgaagcactctgtatcaaaggaaagaaatggaaagtgacagagcaggacacctgatgttctcctattggcctctaatcattcatcttactacgttcatttggtagaccagttgattatactgcatcatggaagaaggctggtgattttgaatagtaaacattgttgtgactaggatggtatagggtctttttgcaatgaataaacttcaaaggattcagggctgacatcaaaacagctgagctaggggcagttccagctctaccaatagacatttaaacaatagagcatagaatttttaatgaaaaccaaggctcagattacaattaaatttgtagaactcattgtgtctctcatttctaagttcaacaaagcactatctaatttatgattaaggaaatgccaccatgaaatttgaagtaatttaattagtgatgtcaaaattaaaagatttgagagaaatgggattgagggctgattgcttttaagtgaacaattggaaaccatgggtttgaactttcctcctacttataaatggagaagagaccctgacagaaaatacatgtgtgcataaatgaggtttttgaagtgaagaatctttcttgcaactttaaacaggatgtcaacaataatagggaccacagccctaaactgtggccattagcagcctatagaattcttttcaatgttacagatacagtgtagtggttggcaaggcttcactactttttttagaagccctaggtttagttcccagcacccatactgtaactcacaaaaagttctaactccagtctgcaaatctcttctgaactccacaagcacatggcatgcacatggtatacatacagacatgtaggcgaatggtcctatatataaaataaataaatctcaaagtatctttcaaaaaaaattattttctgagaaatctactcaggtgaaataaaaaattaggattggtttttagttttctttcctcttttcaccttctctctctctctctctctctctctctctctctctctctctctctctctctctctctctctcccctcctctctgtctgtctctccctctctgtgtgtgtgtgtgtgtgtgtgtgtgtgtttgtgtgtgtttgtgtgtgtgtgtgtgtgcaattatagtcaatgcctgtagagatcagtggaaaacttgtgttagttggttctctccatgtatcctctgggttccagagattaaattcaggtcatcaagcttagctgaattttacccattgagatcttcttggtccagaaaacaatcactttgtataacacacatggtcacctggctattctcctgtgcaagtttggttcccagtattgttctactctaaatttctagtttagttggtggggtaagcttgaccaagtggaggtagtaggtagtcacactagcagcagggacctagtgttttcttttctcctgtaattagacctgtgctgactttctgggaaaccttctgtccatgtcagagtctaccatggctagaaagctacctgagcttggtgcaaaatggaggactccctttcttggctgtttttcttcttctatgcatgatcttatctggagagttttctaagcacaggtacctgaccttttctggaggatgactctgtgcagagcttcctgtaagcgctgcatgagtcagcatgtaagtctagctcatcccttacctctctataataattaattactgtgttatgaccaatcagtttttaccacctgtaaacccaagaaacctcttggcatgttcttggaattcctttccatgtaaataaagcatgagcgccttagtcaataatgtatatgcaccatgtgaatccctctctgctccccaagatctaaacccttgttcacccttaataaagatgacttatactgtctcactgaagctgatcctggaagacaggcaatccataggtcttcaggccatcagcccccaggagaagggagagtcaaactgactcaatataattttattttgaaaaaaaaaaataaaggcttcagattttgtttcttacaatgttgatctgacctaagatgattaagacagaggaagactctgcggaagtctcccttttttttaactgggtattttcctcatttacatttccaatgctatcccaaaagtccctcataccctctccccccactccactccccccctcccacttcttggccctggtgttcccctgcactgaggcatataaagtttgcacaaccaatggacctctctttccactgctggccaggatattagcccagaaacttagcatacccaagatacaagatacaaagcacatgaaactcaagaagaacgaagaccaaagtgtggacactttgccccttcttagaagtgggaacaaaacaaccatgtaaaggagttacagagacaaagtttggagctggaagtcttccattttgcttgaagattacaaaagatggtgcactgagcttatgagttttattttaagaaagctttggtacaggtgttgccaaaaaagctagaaataaactgtgcttatgttactgctcctgtttaaataaacagcttttcaatgtgaggagaatacatttggaattctagaggaggagtagattttcttcttctgtttttgttgttctggtttggtttggtttggtttggttttggttttaattgggcaagtaatcaaaaaaatgaaatgattgtgtgaaaattgctgctattcacaatttagtcccaaatcaggtagacatcaccagctgagcagttgctaacaggcccattacttatgcaacagatgttctttaccatgagaagggccattcatataattgacacttctgcatgaattagtactatctacttatagttaagacttctcaacaaagatgaaatttctttcggcaaccttttagtaaaatatatttgtgttcctggcgttatattttttaaaacagggatttgatttaaaaatgtaaatatatatataattccctcttgtcccctcatcagcataacatttagattgttcagatatatttcaagtgaagctcaactactccttggtggcattgaatgctctcctgatcagcctaggttcatctgagaggagaagctttaatttaggaattcaaggctggtctatgagtatgtttgtgattgaaattatttgatagtaccatccataccagaataggctaaatgacaatgaagatagcctcctccagacattttcacaagtcaatctgatctagacaattcctcaattaagaatcctttctcaggtgtttctaagttctgtcaacttgacagttcaagttaactaagacagtgggtgatagccaaatagaaaattttactgtaggggataaaaatactgactgatgatattcttatcgcttatgttagtggtgtgcttacgtttacactttccaaagctattttgttattgctgttttctttggaatctttctctgatagtggaaaacataggttttcctaacataggttagacatagaaatgaacaatgagtgaatattaaggagactaaagatagtgcaagatagggtaactcaggatctacaacatgccaattctatcggatctcaaagttctaatcagacttgaaattttttctaccctgagaactacaatggaaacataattaattctttgaaagcagaaataagatgattgatgaagttttctgttaattgtttcctcacagaagcaccatgttgaagttgctaatgtacaatcaaatgtgataaaacattaaaactcaaggtcaaaacacctactcttggtatatcaaaaataaacaagatattgaagaaaacaagaagaaaagagttggctacatcatccatttctctgcttcaagctgccaagcttggagagaaatgccttttggttggagaaggaagaaataatttagttcaactattacacttgcaacccagtacagtgtaagctgagcacctaaaattataagggtcaatttccacccacatcattcagcaaggcctcatgttctaaagattctgcaaacctttcaaacagtgctactaactggagacaatgtgggcaagcacactagtatgtacaggaaatttcacattctgatcacgacatgtgcatatgaaatttggagacatggatagagctgaagtagccacagattcaaagcatttgtgtccaatctattgagtttaatatacagttgtttgtaaatctcctccagagtcaatcagcatggtgtcagtacaatgatcactcagagaagagtaggtaggaaaatgaaggcaagagctgagctttgaaggtatcctctgggaagatgggacctgcttgaggaaagaatactcgagcagggcaaaagctccaaagctggaaacaagtgcctgaaatccttctgcttatctttgtctctctctggaaagttgagttaggggcaactgaagatgaaggaacacaagttggaactggtaattgtaacttgacagtgatgctggcagtttccaatatcaggaaaaacagaaactggaaactacaggacgtctgaaaactagcttgggcaacggacacagtgacatagaaatctgctacataaagaaatctgctacataaagaagtttgtgtgggctagtattgagcaactgaaaaagtttgagttacaggaaacttagaataatagatttattatactttccaattaagggaaatgtattcattttgaaagtatgactggttgcagaaatcaactatatttaagaaccagagtagaaagcattgatttagcagaggggaaaacaatattttctttttttcaaagcaaacatgcaagacttcctcttctaaaaagtttgcaagaactcttatatttttggttgtgagcctagcctttaactgctgagccttactgggataagagaccccttggtattgctaactttatatgccccaatacaggggaatgcaagggccaagaagcaggagtgggtgggtaggggagcaggactgagggaggttatagggaaatttcgggatagcatttgaaatatatttaaagaaaatagctaataaataaataaataaataaataaataaataaagtttgcaagaaaagaagattgtggacttaggtaaaaagattgagctgtttttttgtggatgggagagggagggggtcttctgaaatagtgagaagatataacactgctgttaggagtgtttttcactagttggatgggctccctgtggtgttccaatcatgaatggctctggattcttgattgatccttgagttgcataattaaggaatgaaatcttaactcaatatttaataaatcatttgtgaaatagtttgactttttctgtgaaaacattctattattacattctataatttttagttttgatttcccagtatattggttctgtgttttgtttaacaatataatgatacacaaagtgtttttatagatataaaaatacactattttaccctaagatcatgtttgaattcaatgcttcaataaaccttgcaatttccattcatgctcttataacttttttcagtttttaaagaattgtttatacagagttaatattataattcaatattaagcaagaaaattctcttccccaaactaaatgcaaacttgtatttttagtaactgataaaacaagcatcaaccaatgaggtgattttatgctaatccacataaagtttggatttcttcagatgtcggcttctcataaaaccaccatgataacacattaatggattgggatttattacctgatactgtctgtgagaacattttaaaaattgaaagcatgtggaagcaggtgatagatatagttagtttctacattgctgtgaccaactgtcaaaagcaacttaaggaagaaagtggtttattttggttcacagataaagggtgtaagtccatcatgcttgtaggaagatatgatggcagtggtgtaagtcaactggtcctgttgtgtcctcagtcaggaaacatggagagatgaatgctcatattaaataggttctcttcttttattctgtccagctcatgctaatctaaagtagccctaatagatacgatcagaaatttttctttaagattattctagattgattcaagtttatgattcatttaaatcatcacaattacatccctgtctatttgacattcacacatataatttttaaagctagtatattttatattttgtcttcatagatacagaactgattccataatgcaaaatgcattaaaaattgccatcgactttaatagtcaaacattgtataaacttcaaagtagaattctcttctgagacttaagataatctcttaaccctgagctacaaaatcaagagttagggaggttcagtatgcaacagcacaggataaatatatctattccataagggtataatgaagacaggacaaggaacagtcagacaaaggcaagaaccaaacccagcagggccaactccaaatcctcaagactcctgatagaattctctgagcagcaaaggacataggtaacctccttaatatggctcttctgccttcataattcatggcatctctctggggcaagctcccaactttcctccattatcatggtactgcagccatcctggtgtctacattcccttgtaacttcataaggttccctgcccaccagtgcctcatttcagagaatctcaatttataatccatgactgatttcagcagacttttggaagttctatgtgtttctccatgatccccttaatcttacatttgtcatgtctataaggcattgatggagatgctgctgtgttctgttggcatggtgacatgtagcctaggctccattagaccaaatggatttctgtctgctcaggtggctattttggagagaaggcatttcagttcgtcttctttcaactgtctttgctttcatctatatgagaatttttaactgataggatcttgatttcaagatacaattcatattatctatgactttgaattaccccagaattcttctatagtcaacatttactttttacaatatttctctttcttctattccattatagatatgaataaaaagcagtgtgctgtagtctaacaccacctgactatgatgatgtcttaatatttttgtttccaaacaattagtgcatttctttgaaatttagacacagaatttctcagagcgggaagaatttaaccagaatttaacctttggcattacaaggaggaatggttcttagcctagtttctcatacagcttttcccaccttggaaactgcattgaccaagcccctgttgtccatatttctcttgcagtctggctttgcaaattcctaccaaggtgacctgttaagattggattaagttagcctaggcctttcctagatcaactttcaaatcttttacaacttcttcttgaaaaccttctttaaagggccgtaggtaatagcatcactttgttgcagctatattcctgctcctcgggccagctttctgtgttagttacttttctcattgctgtatttctcagaatatctaaaaagagcagcttacagaatggagggtctgtttccctccatcatggtggtaaaggtgtagcagtgggaactgaagctcttcggaacacctgctcagaatgaagatatgagttcacatgctctgctaaaatttaagtgtttatataatcttaaacccacagaatgtgggttttcacaattacaattaacctaacctagaaaatccctctctgcacattatatctaaagtgattgtagatcctgtcaacttgacaaacaacataaaccattacaggaatgatgtaagtctattgggggactgaagtttacacagctagggccattgtttcagtgtgaaaatttgaattttttgaggtacatttcatgcagttttacaactaagtcatttcctaggcctgcttggctatgcttgcttggctgggataaatatatatatgttagcacataaagatcaaaattatgtgaaatgtctgctcctaacattaggttgaagagatacaaattactgggttctatttacctgaataacctaagactcaatatactagtaaatattatatttttaaaactttagatattttacattggtatatgtttctgcaatatacatatgcagtgccatgaaaaccagatcctttggagttaaagttccaggtaattgtgaatatcatgtgattgtgggaattgaaccccagccctgtcaaagaggaaggagtacttttaaatgatagtcatctctccagctcctgctgtgttgttctttttattactcaaattatagaattttaaagaaacaaaagaaagaaagagagagagagagagagagagagagagagagagagagagagagagaaagaaagaaagaaagaaagaaagaaagaaagaaagaaagaaagaaagaaagaggaaggagggaggaaaggaaagaaggaaagaaggaagggagggagggaaggagtaaagaaggaaggaacaagggaaggaaggaaagaaggaaggaaggaaggaaggaaggaaggaaggaaggaaggaaggaaggaaggaaggaagggnnnnnnnnnnnnnnnnnnnngaaggaaggaaggaagggagggagggttgggtctcaatgacagccatagttgtttatcagtgttgaagactgcaaatgtaagccctgaggattttggagatagacagtgaggctttcccatcaaatattttcctcttagagagctgattgaattaaatatgtgtttcagataattggctttttgaattcaggcagctgaaaagaaggaagtattatgtaatcagggcactgtagtggcatgtataaagctgtgttttaagaatacttgaagtacaccaagtttaatcttcccatgttaaggcacttcactcctggatgattcacccatagttcattgcccaatatcaaattagttataaggcacattaccatcactttgctataatgctacttattaatctagcaaaagaaactctgaaaggaacaggttggtccctgagtgattgtaagtcatgcagtatgtcaggatcaatgtggaaactggaaaactagattagaaagagtggcttgaaaaacaaagaatatagattgatattagagggttttgtattattccatgagatctttgttccatactgagcaaaagagttacacatgggttgaaaagggaaggtttttcctctgatgaaatataaagaccaggaggaaaaaatttagggcatgtcatgaaaaattaatagtattcacgattctcaagtccaattatccaacaaaattgactttaaaataatcagtgctaagtgtagtccttatcttcttaagcctaattttttctactttggttctaagagaaataatgattaatattcctacctcagtccctaataaaaatatgtattttagatttttgtctatgggagtccatgtagcatgaattacattttctcattctatcatcaattgaccaaggactgttcataagaagtaccatctcagcacttgggaggcagaggcaggcggatttctgagttcgaggccagcctggtctaccagggctatacagagaaacccagtctcgaaaaaccaaaaaaaaaagaaaaccaaaaaaaagaaaaacaaaaagaagaagaagaagaagaagaagaagaagaagaagaagaagaagaagaagaagaagaagaagaagaagaagaagaagaagaagtaccatttcattgcttctcggccttttggctaagatcaagtgaagaagttccctctcagttgtgctttgtctctggaaccatagatgtcatcatgttcagcattatgctgtgtgatggctttctgagagatgaaccactctgaggatataggactgtatttatctctgatgcaaaatatgtgcattcaagggtatagtaatagctatcagtgcagctgatatatgtctctctgtggagacatgcttattgaaggaaagacatgcttattgaaggaaagatagttcttcttactaatctatggtggtttgctcataaaaataaaggagtccagaggagatctgttaggcagaaaaatactgactgggatggaactaagtttatttagtcaagctcatggctgttgagatcagaaaaactagagattgcatcagtgagtaagaccaaataagaaacacaggtatcctgactggctttttacagtttgagaaaggaagcagagaggagactaaataggaagtaccccaggtgcttagtctaaatgtgaatatactatttgtgctgagggattataatgttgaggcaaaatgaatgccaagaccaagtttattggtagctaattgcagactttaaggaaaactgcagggtgttatattgattgattgtttatgtagaaggggtaggtgaggtaccagactgtagctggtaccattcccgaacccatcacaaaccaatctgagggaagcaagtccataacagaaatcacctcttcttggctctatttagttttgaatcgagtttacaaaaattaaccaacaaaattttagacattttgaaccctaaaaagttatttcaaataaagactatcttctttttttaaattagatattttctttatttacatttcaaatgttatcccctttcccagtttcctctcagaaaatcccctttcctcttctccctccccctgctccccaacccacccactcctgcttcctggcccaggcattcccctatactggggcatccagccttcacaggaccaagggtctctcctcccattgatgaccgactaggtcatcctcagctacatatgcagctagagccatgagtctctcagtgtgttttctttgattggtgatttagtcccagggagctctggggttactggttagttcatattgttgttactcctatggggctgcaaaccccttcagctccttgggtactttctctagctctttcattggggaccctgtgctctgtctaatagatggctgtgagcatccacttatgtatttgtcaggcattggcagagcctctcaggagacagccatatcattctcctgtccacaagctcttgttggcatctgcaatagtgtctgggtttggtggttatttatggaatggatccccaggtgggacagtttctggatggtcatgtcttcagtctctgctccaaacattgtctcttaactccttccttgggtattttgttccccccttctaagaaggatcgaaatgtccacactttggtcttccttattcttgagtttcatatgttttgcaaattgtaccttgtgtattctgagcttcagggctaatatccatttatcagtgagtgcagatcatgtgtgttcttttgtgattgtattacttcactaggatgatatcctccagatccatccatttgtctaagaatttcaagaattcattgtttttaataactgagtaatactccattgcgaaaatgtaccacattttctgtatgctttcctctgttgagggacatctgggttctttccagcttctggctattataaataaggctgtgatgaccatagtggaacatgtgtccttattacaagtttgagcatcttctgggtatatgtgcaggagtggtattgctggatcttccagtagaactatgtccaattttctgaggaactgccagactgatttccagagtggttgtaccaaattgcagccccacgagcaatggaggagtgttcctctttctccacatcctcaccagcatctggctcagtggtgaagagcaatgcctacttttccagaggtcctgagttcaattcccaacgaccacatggtggctcacaaccatctctaatgaggtctcgtgacctcttctggcctacaggcatacatgcaggcagaaacctgtatacataataaataaatttaaaaaaaagatcatcttctaaagatgtcaaggtggattggttggtgtgataacagctttggtgattttggtctgtggtcatccaaaacttgtcaaacaccagagaaggaaatctctgacccaataaagaaacagttgacatagggctagaaaggggtccaagtctgcaggaaggtagttctctatgggataatgtagacttgtgaagttacagtaaattggtagctcttatagtttaagcattggattgtagataaaaaagaagaatggtttccttggaagctgtagggtgttctttcagtctctttttcttttcaaaatgggtggcatattgcctatattttaattaatttccatttgtgaagccatgaaaatgagaagccctctcagtaaccctatgttcaatgcacaatgaagcatgtgttaggcaaattccctgatatttccagaagattaatatgagccaagtgcagaaatctgcttgggttattgaaggctgacgacgatgtgtgcttataatgcatgttttctcccttacaaatatgaaactctgttgatgcacttttcaattatgattacctttgtttttgcagatacagtcgtggtatataaaaccaacaatggacacgtcatgaaactgaatacagaatcaaatgcttccacattgttattggacaactcaacttttgtaagtgatgaataattacctgtatgatgtattccactgctcatcagcaatgactctcgtggtacttagtatctgtaacactgctctagtacctttaccccatttaatagagaaaactgagactcagatatcatactatattgagaaattactcttctaactggttccattgtcaccattaataggtattttcagtttgttccatggcaatgctgaatttccccagaacatctgttgtagaggtgtcatttgttgtccaaagtttgctattgctatcttagtcagggataactgacaatggctctgtggcttatcactgggcttttcattccatttagctttggtatgtattttttttttttctgtcagtgccacgttggtttggttacagctctatgataatttgagagcctgtagcattttccttactgtttaagattgccaggatattgctgatcattgtgctcatgtgaacattaggttcacattttcttctaggtttttgaagaattctttgggctttctatgctgattgcatttaatctgtaaattggtttcagtaacaaatccatttttttagtattaatcctgacaatcagtgatcactggagatttgtccatctttagtgtttttaacccactgttaaaacaattgcaccatctgtctctgtctgtctgtctgtctgtctgtctgtctgtttctgcctgtcgtcctttctctctctgtctctttctctctctatctctttttctctctctctgttgtgcatgtgtctgtgagtgtgtgcgtgcctctgtgtgtgtgtgtgtgtgtgtgtatgtgtgtgtgtgtgtgtgtgtgtgtgcgtgtgtggtgcatgtgtgtgttggccagaggtggacaccagatgtcttcatcctcaattgttttccactttatatttgagatgagttcccttcactggacctggagttcaccagtttgctatcctggcttaccagcaagccccaggaatcattctgtttctgtctaggcctggaattacattgcattgttacatacagcttttcagatggatattaggaatgtaaaatcatgttctcatgtttgtctggcaaacacttcccaaccaggcaatctcccatgttaaaagtgttcatcagatctaagaattttctggcttagtcattaaggccctttaggtatagggttatgctgcttgcaaacaggatgcttttacttctttcattcttattagttctgcttttattcctatgctgtttctgttttagtccactttttgagcatcacatcaagcaagactgtagaaggtagatagctttgttttctttctggttttagaggaaatgctttcagcttccctatttggcataagtttggggatatatactacatttttatattgaaggacatttcttttagtcataatttgttcagggatgtgttatcatgaagcaatgtttaactttttcaaagctttatctacaggagatgatcctatgactctgtttcttacgtgttgtatttcagctattcattagtgtgtgctgaactaattttaaaaccttagaataaaagttacttggtcatggtgttttgttctggttttctgtctgttgctgtgaaaaaaaaaaacaacaacaacaacaacaaagcctcaaaaacacaacaaacaaaaaacaggacctaactaaagcaacttaaagaaggaaggaatttagtctccttaatgctcttggtcacagtccattaaggatagaagctaaggaaagaactcaagcaagaactgagggcaagcctgtttgctactgcatatgccattgactaaggaattcactttatagccaaagaagtgaagcaagaacaatagaggatgctgctggctggaagtcagacttgtgttcagctagctttcacatatatactctatgaccattggcctatggagtggtgctgcctagagtagcctgggaccctccacatatcaattaacaaccatgacagtcttccacagcctggcccacatgccagtttgatataggtaattcttcaattcaggcttttccttcagatatctctagggtatgaaagttggcctaaccaggaaatgtatgatttttgtaatgcatttgtgtgttcttttgcaagtgttttattgagaaaaatttacctacatttatctgggaaattggtctatatttctatgttgcattttatctggttttatacaattttgtctttgtagtatgagtttggtaatggtctgtctctgtattttatgatacaattttagagtcaggtcttaaagctttgttggaattctgaaataaacattttttccttatttatactaaaatcacattgcatgctatgaatatatttataactgttggtgtatgtgttggtttaatcaattttacatatcttcaagtcactagggaacagggtacctcaatagaagaattaacactgccagcttgaccttggtggcattttattgctggctaatgtggaaggaccagtgtgttgtgggtagtactgagctatatagtaaaggaagctcagtggttaagagcactggttattctcctagaggaactgggtttgatttccatcatccacatcatggcacccatctgtccataacttcagttccaggggatctgatgttattttctgcccctaatgatgtgtactagattcatttaatgggcctagatgcacacagaaaacacctatacacttcctatctatctatctatctatctatctatctatctatctatctatcttatctatctatcatctatctatgtatctatctatctatctatctatctctatagctgtatctgtatctgtatcttacttataaaagttgagcaactatggaaaggaagctactaattaaccaatcattattaaattgtgtgtgtgtgtgtgtgtgtgtgtgtgtgtgtgtgtgtgtaaataattgaatgacttggcaacctgccaaaagtataatgacctgagttccatcccctctgggacacacaggttgaaggagagtattaattcctgcaggttgtcctctgacctgtacacaccaatgaacgcacaaaaatacatccacaaaagtaataaaattgttttattaattaagagaaaataatgacagttttgtttaaatggtaataaaccaacacctacttatctagaaataattgttgtggatgtcatacttcataatacttaagagagaaaaataggtaagactgattgccattatgcaattacctaagactctctaagggaataaacctcctttgaagagatagtatgaactttcataaaggactgtagaaagcaacatagaacagcctctagtattctctctttaggtgaaggaccactttgtggtcctcagatacatgagagatagacaagaatcactgcttgatcacctaatagtggaaaacaagtcctccataagatgataagacaggaaaaaggttcttttattcttgagaagagtttttcctgtcccaggttttttgttattccagatgaatttggacattgccctttctaactcattgaagaattgagttggaattttgatggggattgcattgaatctgtagattgcttttggcaagatagccatttttactatattgatcctgccaatccatgagcatgggagatctttccatcttctgagatctttgatttttttcttcagagacttgaagttcttataatacagatctttcacttccttagatagagtcattctaagcttttttatattatttgtgactattgagaagggtgttgttttcctaatttctttctcagcctgtttatcctttgtgtagagaaaggctattgacttgtttgagttaattttatatccaactacttcactgaagctgtttatcaggtttagaagttctctgatggaatttttagggtcacttatatatactatcatatcatctgcaaaaagtgatattttgacttctttctttccaatttgtatccccttgatctccttttgttgtagaattgctctgactaagtaaaatgttgaataggcagggagaaagtggacagctttgtctagtccctgattttagtgggaatgcttccagcttctcaccatttgtttgatgttagctactggtttgctgtagattgcttttatcatatttaggtatgggccttgaattcctgatctttccaagacttttatcatgaatgggtgttggaatttgtcaaatgctttctcagcatctaacaagatgatcatgtggtttttatctttgagtttgtttatatagtggataacattgatggatttccatatattaaaccatccctgcatccctgtaatgaaacctacttcatcaggatggatgattgttttgatgtgttcttgggttcggttagtgagatcggttagtgagaattttattgaggatttttgcatcgatattcataaggtaaattggtctgaagtcctttatccttgttgggtatttctgtggtttatgtatcagagtaattgtggctttatagaatgagttgggtagagtaccttctgcttctattttgtggaatagtttgtgcagaactggaattagatcttctttgaaggtctggtagaactctgcactaaacccatctggtcctaagcttttttttttttttttctgggggggattattaatgactgcttctatttcttaaggggatataggactgtttagatcattaacctgttcttgatttaactttgatacctggtatgtgtctagaaattgatccattacatcaatgttttctagttttgttgaatatagccttttgtagaaggatctgatggtattttggatttcttcaggatctgttgttatgtctcccttttcatttttgattttgttaattaggatgctgtccctgtgctctctagtgagtctagctaaggatttatctatcatgcctgacctaaagctgtactacagagcaattgtgataaaaattgtgtggtagtggtatagtgacagacaagtagaacaatggaatagaattgtagacccagaaatgaacccacacacctacggtcacttgatctttgacaaggtagctaaaaccatccagtggaaaaaagacagcattttcaacaattggtactgacacaactggcagttaacatgtagaagaatgcaaattgattcattcctatctccttgtactaaggtcaaatctaagtggatgaaggaactccacataaaaccagagacagtgaaacttatagaggagaaagtggggaaaagcctcgaagatatgggcacaggggaaaaattcctgaatagaacagcaatgtcttgtgctgtaagactgagaatcaacaaatgggacctcataaaattgcaaagcttctgtaaggcaaaagacactctcaataagacaaaaaggccaccaacagattgggaagggatctttacctatcctaaatcagataggggactaatatccaatatatatatatatataaagaactcaagaaggtggactccagaaaatcaaattgccccattaaataagtggctcagggctaaacaaagaattctcacctgaggaatactgaatggctgagaagcacccaaaaaatgttaagcatccttaatcatcagggaaatgcaaatcaaaacaaccctggcattccacctcacaccagtcagtgtggctaagataaaaaattcaggtgacagcagatggaacacccctccattgttggtgggattgcaagcttgtacaaccactctggaaatcactctggtggtcctcagaaaattggacatagtactaccagtgaatcctgcaatacctttcctgggcatatatccagaagatgttccaactggtcagaaggacacatgccccactatgtccatagcagccttatttgtaatagccagaagctggaaagtacccagatgcccctcaacagaggaatggatacagaaaatgtggtacaattttacaatggagtactactcagctattaaaaagaatgaatttatgaaattcctaggcaagtggatggatctggagggcatcatcctgagtgagatcacccaatcacaaaagaactcacatgatatgtactcactgataagtggatattagcccagaaacttaggatacccaagatataagattcaatttgctaagcacatgaaactcaagaagaacgaagaccaaagtgtggacactttgccccttcttagaattgggaacaaaacacccatgtaagaagttacagagacaaagtttgcagctgagacaaaagtatggaccatctagagactgccatatccggggatccatcccataatctgcctccaaatgctgacaccattgcatacactagcaagattttgctgaaaggacccagatagagctgtctcttgttagactatgccagggcctagcaaacacagaagtggatgctcacagtcagctaatggatggatcacagggctcccaatggaggagctagagaaagtacccaaggagctaaagggaactgcaaccctataggtggaacaacaatattaactaaccagtaccccctgagctttttttctctagctgcatatgtagcagaagatgacctatttggccatcactggaaagagaggcccatttgttgtgcaaactttatatgcctcagtacaggggaacaacaaggccaagaagtgggagtgggtcggtaggggaattggggtgagagggtgtgggggacttttggtatagcactggaaatgtaaatgaagaaaattcctaattaaaaaaagaaaagacaggaaaaaaggaagggaggtttgggcataataagcgtatcatcatgaagtccaaactgaaatcaatttggttgtttttttgcagcatttttttaggaagcaaaaaatcatatgcattttcattgtttgctttacctgtaggtaacctttgtaagcaaattgttgtcacccagtcaaatcattcagattaggtttagagccccagtatgggaattactttgtctgtgactgattccttccagtcgcagcctacttcagataaatgctatatttatttttatcagaaattgtttttgtttcctttagaatttattccacgcttttttttcagctttcttgacatagcaagaaaaataattcattccatcccatcatccatcattcctattgtttttgttgttaaaacattatttctgtctcacctcattaatatagccttcatgtgctaattaatgcaatctatctaggcttatgtatttatgttttaaatatttctttgatgtcttcttgtagtttttttctctgtaacctataacttttaacagagccacatttaataaatattctaattaatattctcatgtgatgtattggccccctaaattcatttacaaaacagtgcagttatgcaggttacaagtctcagagtaaaggttaggagataagattgtgttcacccagttacccacaatttgagatgaaaaaatgtcaatagaaatctatatccttcccactcaaatatagtattattaaggacaattgggttttaaagttcaaattagtttaatattttgatttagcaactctaagtcatggtattaaaaataatttatcagaattaagaggtagttcctttgcataatgagagttattttacttatagctataatcattcatgataataattgtaactgaaaatctcttgataaattcatagaaaatcaattgagaacctttattgataaaaattgtcaagtatatagcacaatactctaaatctttgaaaacatggtatatcaaaaaatgtcaatttacatgtttgttaaaaatgtattttatttttattcttgtgtctgtgtgtatgccatgagtgtttactgtccatggaagtctgaagagtgtattggatcccagatctacagtgaaaggtgattgtgagctgcttgatgtggctaggaactaaacttaagtcctccacaagaaaagcaggcccatatcaacactgtccttagctcctcatttctttcttaagatcatttgatgccatttttcattcatttcaagcatattttaaatatattaactgattattttaagatgtgtaatcatgggttaaagactctaaataagaataatattgatgtaactgtcaaaaaatatgattttcatgaaacatttttccatgaaaaaatgtcctactgtatactttgtgatttgagataggtgaatggaattctaaggttggagacccaaaaaagcttaccaatcttcaaatatgagaatgtaaaagaattgatttagctccaatgctgttgctaacaagtataagcatttgaaatattatttctagatccagaactaattcagatagaagagggtgcagagcaacattgcaagcatcctctatgtgtcagctgtgatcctcttatgattgatagtgtgaggattggcagtcatcttgaataacagtcatacagtattctgccaattcactttccaaaattaaaaaaaaaagggggggagagactacatattcaagtttcatgtagctaaatattaagacctattttaataaagaaatcttaggtactaatacagacattaataagcaagaaataagaatgtatacacttcaacctgtcgaaatatatgttaaaggggctagagagaaggttcagttggttacagcatttgcttctcttccagaggacccagtttcgttcccagcacacttacccagtagttcaaaactctctgcaactctacctgcagagtatccaacacccctggcctctgttaacaccagtgcttatgtataaatactcatatgcacacacacataattaatataatttaaaaatcaaaatgcatgtttaaataaaccctctaaaattagtctgagtcagaaataattttctgtggtgaaaaagaatgtattccaagacaattgtagctagacagatttggtccaactgtctattgactgctacaaaaatagtaacatggactaaatgccatgagggtatgtctttgttctgtgtataaacagcatcagtccacattaagactcttgacttgttaactttcatagtggttatgattttctttattgttttccttgctgtgccaccatgaaaacaaaatgaattatggtacagtattcaaaattacaaacatcaaagcaaaaaaaattggtggaaattttatttctctttttacacatttactagggcacatagtaattttaaattttcatttaaaaaatgtgagaagatactacagtggtagccatgtgttttatggactgtgttgcagtcgggtgtgcattatccgtagaggtttctctgagaagagactggggttaaagtagctccagaaattccaccctcaattataactaagaataatctagagactaaattatcctaaggtatcactcatagggacaaaacaggaatattgtcaaagactggtaagatgcatcggctcccacttccagcacttgctgttgtataggtcttcctttggtccgtttgaggccaaaaatctatcaggtaagagctggaagataacatgaggcagaatctgccactgctttgcactttggcctcctgagagacctgcattctgtgatatagccacagccagtcagtctatttggagcagttgatgttggagttataaacatctctgaccatctgatggctggttcagacttgcatttaacttctgaataatttcacatatggctaactcccagtcatggagagctaattaaaacttttaaagagtgttcatcagagaaagttttagacaggaaagcaagtttttagttctattgcatagttgggtggccacagttaatgataatgtaaattctggaatcatggataatacatttcaaatgccttaccactaaaactaacagataaggttggtaaaaattatgttaaatttcttaatatagccattgctcaatgtccatgtataacaaaacatgacattgtaccctgtaagtagttatgcatataatatacatttgtgatccctctgctgaggtaatagtaatatatgaacatgatcacttgcacctgtaaaccaggactcaagaccctgagacaggaagattaaaataaggtcaagattaactggagatacagagtgagatcctatttcagaaataaaaactaaaaaataatgattttaatacaataaaattaaaagcttaatttaaatatgcagccacacatccaatcttgtattcatttatggtgattaagcaagcaaaatacattttcaggagacaattgaggattctgcagctggtgatgcaacctctccttccctttccgcctttggtaatgtttagcttctgcagttcgagatgcataaccctggtggggtgggggtaggggtagggtggggtctgaagtctccaagtgaatgttcgatagaagacaggcattttgatagcacagtggaagcacagtaaattaatattgaatcatatgtcttgggaggcatatgagttcaaggatgttctgggttttgtcaagcatagattgataatagcagtccatcacactgttacaaactttctcagatcccactgctgtttgccaaaaaattgaagcttagaaaaagaaacatcctaaccctacaccgttgctgtggtcaagaggtccttgctgacaggaacctggtgtggctgctccgtgggaggtctgtgcagcaaatgaccagtgcagataatggacgcatggagccaaggatcagactgagctgagagaccccgcgggagagctggcagaaggactagaggagcagagggggattgccatattcccataggaagaacaagatctcctggcgggaccaccctgtgctcccagaaactagaccatcaaccaaggagtgtacagggagggatctatgacttcagaaacacttgtagcagaggatggccttgcctgacagcaatgggaggggaggcccttggtcctgtggaggtttgatgcccaagcttaggagatcctggaacggtgggatgggtgggttggaaagcactcacaaacaggccaatgggaggaaggagagggtggatgtgggatgggggcatggtggaggggtagctgagatgtgggatatcatttgagatgtaaacaaatggaatgaagaattgaaaaaaaaagttgggagagaattatttctataaagcaagttagcagcgaaagccaggtttccagctgaccagaaaagacaaacaaaaagatggaaatgtagacggaagtagtgactacagtttggaagcatttcatcacgattaatttacagagcaactctttcagagaagggacaaggatgctgagttctttcctcagcaggcaggatctttgcctgaggaagctgaaagccaacaagagaggatgttgacagtcccgtggacactcaatgtagacctgtggtgtgtgaggagcgtgctgctgggcccagtgatgccactgagggttcccaggacaggcatgacacgaagcgtctccaaactaagagtcatgatttggagagaaattgctcaagggctttagcctaatttcatcatgctgcctaacaggtagggaaataacctgttcaaattaatcaggaagctattgaaaagtagcagaaaggggttagtattgcatagtttgtacagctagctctcctgagagggaggaacaaacacaccaaggaaaaaaaaatcatcttataataaaaaaaaaaaaaagaaaagaatggaagagaacaagaaaaagagacatctagagtagtctcgagagtaaggggaaaatgctttgactcctgatccagtgttacctcttacatcagtatctctttcaaaattatttttaataatttataaaatacaaaagatacaatttataaaatacatatatactttctatggcaaattccctctttgaagagtttatagtttaaggatttaatttttaaaccttagatttcatttcatgtgtgtgtgtgtgtgtgtgtgtgtgtgtgtgtgagtgtgtgtgtgtgtgtgtgagtgagtatgtgtgtgagtgtgagtgtgtgagtgtgtgtgtgtgtgagtgtgtgtgtgtgtgtgtgtgagtgtgtgtgtgtgtgagtgtgtgtgtgtgaatgtgtgtgtgtgtgtgtgtgtgtgtgtgagtgtgtgtgtgtgtgtgtgtgtgtgtgtgtgtgtgagtgtgtgtgtttagcccacatgaatgtctttaataataggaggttgttaaccaccatgatggtactggaaactcaacctaggttatcaggaagagaaagcagtactcttagtactgagccatctctccctcatccaaggaaatgactctttactgtgttctgtttggttctttttgtttgtttgtttgttttggcaaaaccaataaattcccacattttttaaaaattagaaaatgttgttacattaaatatattttcatatataaaataatacatatatgtatattttaaaattatatatatatatatatatgtatatgtatatatattcacataggtttggtggctccataatggctatctagaggatcaatagatgacagacaatggaaaggtagatagatagatagatagatagatagatagatagatagttagatagatggatagataggtagatattcacttgcaggtatttagtaattgaattccgtgttttactgccatctaaataagaaaatatgaccacatacacacaaatgcacatatacatttaatagagaaagagaaaaatatggttttattgaccccagttgctatcatttggccaaaattgcaattttgccatattttaaatgtctcagtctctaatacccatgccatgattctttcttttcaaaaaattttggtttttgtgtgtgatctctctgtgtgtctatgtctctgtgtgtctatgtctctgtgtgtctatgtctctgtgtgactatgtctctatgtgtctgtgtctctctgtctctgtttttctgtcaaacagcagacagacaaacatgtctatgtagacagccaaatacagacagacagacaaacacacacacagaaacagacacacatacatactgtccctccaccaccactctgtagtatctattactgtgcatcttcaccccatgtctttttcccatttccttgtgtagatctggaagaaatgacctagtttaaatttgaggtttcactatgtgtgcatgctcattcctgtgtctcaccacttaccctggactacttagagggctctgggcagtctggactacagagcaggctctactttgaagcaagtgaatgtattttcaagtcatacttcccgctcacaatgtcatgcatttggcttactctaacaatgacttgtgcagcatagggtatagcagcacattagtccacttttctgtatcacagtttcatggggagaaagttactccttcctttatctctcagcaacatcaacatgtgagtcatttccttaatgaactgaaattcccctgttttggtttgtctgaaggtagcattttttaatagcaacttttggacatcctcagtagtgtagccagctccactgctgctgagcattgagtattttattagataaaataagggttacttgaaccggggttcatcagttactttgctattgttataaaataccttgactaaagcaatttaaggaggaaaaggtttatttcggctcatggttccaggaaatcaaggcaaagatagcaaaaagctcactgattgcattttatccttacattggaagtacaagtagaacagaacatggggcatctctacatgcccttaaattctgccaccagccatccatgtcccccaagactccacttccgtaaccttcccaaacagcacaatttactggaaaccatctgttcacatacatgagtccacaaagaacattcttcatttaaacttcaatgccaagcatgaagacactggagtattctatcttataaccaaggtatccactaaataagaatggggtatatgcatagctttgattcactacaaaaaggatgagtgacatgtgtcacagcatgatgaagcatgatgtgagatgttctcctgctatgtagaatgacacaagtttttaaattgggtaatttcacattactagaaatatccacttagtttttttttccatgagtattggtagatgaaaagacttcaaattctacttccatgatttatttaaaaacctggcagatcttaaatatcattttagcctcatccacatcttcatagcagagctctctgttttaattatttgactattttcaattagtttgtttgcactttcattattaaactgggtgaattctttatgtattaaatatgaagatttcttactcaataaggtctatagtttaatttaaaagttatgtgtgttctttccttgaatatatgtctatgtaccacatgtgtgcaatgttcacagaggtcagataagtagaacagtagaccatctcaaacaggagttacacagagttgtcattgcagggaatcaaactgtggtccctcgggaagagcagccagtgctctcaatcattgagatatctctctagtttctatttctgtacttttgctaaagattttgctatttgttttcctttgtgggtggtatattgttccatggaaagatttttgtttgggggaaataagggtgtagatcagtttgtagactgctttagtaatatgaatgaggccctgggtttaagccccagtgtcacataagccagatgaggtgtaatctcagcactcaggagaagccacaagaatcagaagttcaaggtcaatccttaactacatagtgagtctaaggcaattctgagctaagtgagatactatccaaaaataaccaattgtgagctggagtgtatttatttttcttaattatttttaacttggattaacttgtgggtttctgttatgatcactatcagtttagtcttatattctttgactcattttgtgtttacccttctatgtgaggaatgagaaataaaatcattattgtgcattattgaggcacacaggattatttgaaaagattattctttgacagtgaatagcatttacactcttataatatatgagctattcagaaatatatgaatttatatctggaatctatatccttatatgtctctctctctatatatatataaatttacagtcagatattttcccaattccatctttctttagcaataccttgttaattttagtgctttgtttctcatttttattattctcagagtgtttttctcttttaaattatactttgtctttattattcacaacttcatatgtgtgtataatgaaaaatgatcaatccatttgccacgacccaacccgaacatctccaactaacatgcccccttccaaattcatgttcctttctataacccactaagaccaattaagataatccatatgtttatggatgtaatgccatccactaggtcataaaaaacctgccagcaaccagacattttgaacaagagtacttctctcttctcttatagctatccatttacaatatcttcttaacatggggaggttgtggagagcacccatgatcttgtgtaggtaaccacagctactgtgagtctaggagggcagcagccatgtgataccctgacacattcacagtactcctcctcatcctttggctctttcttatattttctgcttccatttctgcagtgttccctgaggtttaatgagcagcagaaagaggattgcaaacaaagctgtcaggaacccaggtctagaaacacaactaaactgttttgtgatgttttccttcacacagtggctatattggtgaatgctaatatccacatcattgtgtaattgatgaatacacttctctttcccatttcctccctccctccctccctccctctctccctccctccctgtctgtctgtctatttttctgtctttctttctttctctctccctctctttcgttccttccttcctccctccttccccctctgtcttgcccttccttccttccttccttccatccgtccttccttccttctccctctttctttctttctttctttctttctttctttctttctttctttctttctttctttctttctttctcacctttctttctttctttctttctttctttctttctttctttctttctcacctttcttcctttctttccatctttctgagataaggtttctctgtgtatccctgactgtcctggaactcattctgtacatcaagctggcctcaaactcagacatatacctgcttctgttgcaaagtttttggattaaaggcacgtgcctctactgtattttaaattttctaatataattctgctattgtcagaagacaaattttgtatgttgttaaaacaataattacatatttattaagactaatttaagtactttttgtaaaggtatttagtgaagaacaccttatttgattgagatttgttttctgtcttgtgtcacgtatattattttattttgttcttgtgttttctcttccaaaatggtattttctatcccccttttagttatttttctttaggattcaatttggtcattacttttggaatggttgatactagtaattaacttccaggaggcagatgatcacattcagtatcacaagctactgaagaattcactatatatccctcatgttcatgccaaatatcctacctcagcctcccaagtgttgggaaaatacataatataacatgtctctacatttaattatttgtatgtgtgcatgtgtccaatgtgttaatgtgtgtggtgtttgtgtgttatatgtacatgcttgcatgcacatgacacatattagtcagaagatgacatctgggtcttagttcttccattctgaaagtcctacatatcaaagcaaagtagttagcattaacacccttttctgttgaaacattacagtggcccactagcaataggttaagttagattaaggtaaatcaacttaaatacctacttcagtagtacacaaaatgtatcctgccattctcccaatagatccattaacactgtatggtggcttccatctggattatatatgtatagagatggctttttgtgtaattagtcagctgttattcttacagggatcccatagatatggcattagtttctctttctattctcatgatttctttttgttaaattctttctatttgactctcatgaatctattttaggatttctttgattttgctcaattctcaatttattgaacctcttgaataagataaatatattctttaaagatgaaatatttttcacaagttttgaaatttctgctccttttctttgtcatttctatctttagattttcagtctattttctattctataatatactttaataaaatagaagtttagtttttcatctctataactcaatattgatgttttctgtatagtcagtacatccatatttccactcttaaataaaatcacttagatgttgtcaacttgagtgctgggtatcatctccatcatcaccatcatttagctttagcagtagtagtagtagtagtagtaggagtagtagtagttgttgttgttgttgttgttgttgactctttccaaattagcttaagcaactttagccagcttagagctttctgagaggaaaagctcttgactgaggaaattcctagatcatattagcctgtggacatgcctaaagtgaattgtcttgagtattaattgatacagaagggcccagcccactgtgagtggcactatttctaggcaagtggttattcactgtataaggaagcaagttacatgtaaacctgtgtgagagctagcaacatgattcttctttcatggattctgctgtattttcttggctgtgagtgagttctgtcagatgcaatgctgcatataataacaaacaaggctgcttttgagttcctgctttgaattcctatccttacttctttcagtgatagactgtgacctgaaagaatatgatggaataaaaccttttaacccccaagttgcttttggtcagagtgttatttatcagagcaacagatattcaaattgactcttttgagttatctaactcattgcaacccctcaacaattactggggaaaatcaaaagacagcaatgagttaggggagactgagcaaaatctcacctatcagtttcagactgaaaccattcaaaccacttatagtcagcatttttcaaactcctggagtatcctcagattattcttttaatttgaatgattgtttcaatgtgtcatttagaacatacatgttgtaaatctgtttatgttggaagtacataggattaaccctatggcctcaggtatgctagccaaatgttttagcattattacagccccagcctaagtctatttttattagtgccctgatggttccaagtatttattttcccataagggacagaaaacagaaatatttatatttctttatttacttacacacattttttaacacacaaaagaacttggatatcattttagaaaaaaatatatttgtagggccaattcacagcagtgtttttggcaagtgaaaagaagggtaaactagaaattcagtgtatagtatcaaaatgacatgacaacacccaagaatagcagatgctatttcttgctataggtgtcattgtattaataaatattcccatgattatccatataattgtcagaatattatttctttgtgacagtaagttaagttcatttagttgtaaggttgacttataatttccatgtgccatagtgacttttctaagttcttttggttaagccttccatattggatattatatcctgtactgtctttaaatgtttccatttattttgaaactcattaaaattgtccatatactgggaagataaacatctatgtgagccagggatgtgattcaatagttaagagcctttatgttttgcagagaactagggttagattcctagcacccacactgggcagctcacaaccctagcattcccctacattgggtcatctggtctccacaagaccaaggggctcccctcccagtgattccagataaggcaattctctgctaaatatccagctgcagccattaatccccccacccccatgtatactcgttggttggtggtttagtccctgggaacttttggaggcttgatttgttgatattgttcttcctatgaaggggtttacaacccctttatctccttcagtccttgctctaactattccactggggttcccccactcaatctgatgtgtggctatgtgcatccacatctatattggtcaggttgtggcggagcttctcatgggacagctataccaggctgctgtcagcaagcacttcttggcattagcaatagtgtctgggtttaatgtctgcagatgggatggatccctaagtggggcagtctctggatgccctttccttcagattctgctccactctttgtccctgcatttctttttgacaggaaaaattctgaatcatgattttttgaagtgaaagggtggcaaaatcgctaaacgtggggctgtgtgtacccactggatatggtctctacaggttctatctctactttgttgggtatttcagctaaagtcctctcttttaggtcctgggaacctcttgggtccatgacatttgggactttctaaaggatatccccagtttcacctccctcactacaacacagttttgtaatgcaaaagacactgtcaataggacaaaatggctacacacagattgggaagatatctttaccaaccctacatccaatagagggctaatatccaatatatacaaagaaatcaatagtctgcagagaaccaaataacccttttaaacatgggatacaaaactaaacaaagaattcacaactgaggaatcttgaattgttgtgaaacacttaaagaaatgttcaacattcttagtcatcaggaaaatgcaaatcaaaacaaccctgagcttctacctcacaccagtcagaatggctaagatcaaaaattcaggtgacagcagatgttggcaaggatgtggagaaagaggagcactccttcattgctgatgggattgtaagtgggcataacaactctagaaatcagtctggtggctcctcagaaaattggacatagtactacctgaggaccagctatactactcctggacatatatccagaagatgctccaacatataacaagcacacatgttccattactttcatagtagccatatttataatacccagaagctggaaacaacacagatgtccctcaacagagggaaggatataggaaatgtggtacatttacacaatggaatactactcagttattaaaaaccattaattcatgaaattcacagagaaatggatggaactacaaaatatcatttagagtaaggtaacccagttacaaaagaacacacatgatatgtactcactgataagtaaatattaggcaaaatggctcagaatatccataatacaactcacagaccatatgaagctcaagaacaagaaagaccataccaaagtgtggatgttacagtcttactcagaaagggaaagaaaataatctccgaaggtagaggaaaagagggatgtgggaaggagagaggaggggtaggaataaaagaggaccagtgcagataagagaggtgatggatgagaagtacagagggtcaggaattgtgtgtattcaattatgaatagggtagccttatcctgacctcataagtattaattgctgatgagttctagctgaaatccaattattgtctccatttgtgcaccacaagactccaatagatggttcaaaacccatagatacacagagaattttgcttaatcttaatggatctaaaaaaccttgaaatgtttgaagcagaattttagggaagagaggtgtcaagagggttacaaggagggttgttgatggtgggtgggtacagtattcataaaacacattatatattagtaacattgtcaaggaacaatttcttctaaaaattgattgtaataaagtaatttttacagaaagcatggcttgaggtaatttgctattagacaactatattccaaacatgttaccttttaagcatcatgttagaaacatgataaagcattatagtaagaaaaaaagattcaaaatgtatactcttttatattttgctagattttacatatacacagacccaaagacacacatatgcatgatcacacacacacacacacacacagatacacatacaatcacacagacaaacattgttcctgtatgtatgtggtatgtaggtgctcttgcatgcggactcaaaggttagcaatggtttcttctcctatagccttccatcctttgtaattttgagccaacatctctagagtctgaaactagccatttcagctagactggctggttatcgcacccttgatatccctgctttatcttcacaagtgtgcagtaaaaatcaaacaaaagaaaagaaaaccaaaccaaaacaacaaaagaaacaaaggaaaaaccctttctcttacatgggtgctgaagatccaatctcaagttgtagtactgagccatctagctagctagctccttactctttctgtttattctattatttaatgtacgtgtccttaaatgtaacagagctatttaggagaaaagtatattcaagctatattaagcattaagttaatttgaaaactcattagagcagcacaaacttaatttcaaacaaaagttggcatggttatgcaagtcataatattcctgtccccattcacctagagcctttgtcatttgtcaacacttcccaatagaaaaatactggcagatttctcttcaaagtcaccatgtctgatctacttaccccactgacagaactcagtgggtattaaaaaaaattaaaggttataaagaaattatacagtattgtatattgcctatgatctaaatcaatacaagattattatcaccattcatgattattgagcattggggatctatgtaaaatattccacatagattactaggcacagatttactaatcttaaaaacagaacatctagacacaggattgagaggctgagtcagttggtaaagtggctgacattttttagtttggagatgagatgaaaggatggtccatgtagagactgccatatccagggatccaccccataatcagcatccaaacgctgacacaattgcatacactagcaagattttatcgaaaggacccagatgtagctgtctcttgtgagactatgccggggcctagcaaacacagaagtggatgctcacagtcagctaatggatggatcacagggctcccaatggaggagctagagaaagtacccaaggagctaaagggatctgcaaccctataggtggatcaacattatgaactaaccagtaccctggagctcttgactctagctgcatatgtatcaaaagatggcctagtcggccatcactggaaagagaggctcattggacacgcaaactttatatgccccagtacagggggaacgccagggccaaannnnnnnnnnnnnnnnnnnnnnnnnnnnnnnnnnnnnnnnnnnnnnnnnnnnnnnnnnnnnnnnnnnnnnnnnnnnnnnnnnnnnnnnnnnnnnnnnnnnnnnnnnnnnnnnnnnnnnnnnnnnnnnnnnnnnnnnnnnnnnnnnnnnnnnnnnnnnnnnnnnnnnnnnnnnnnnnnnnnnnnnnnnnnnnnnnnnnnnnnnnnnnnnnnnnnnnnnnnnnnnnnnnnnagagagagagagagagagagagagagagaaatgcatacacatataaaatgcctagttatatcatggattgtctgcattggcctgttttagaaaagtagcaaatagcagaaagtgaccactgtgtttgtaaaacatgaaaacaccaaaccaccatttggtatcacaaaaatatacaatggaagttctgtccttggtaacagaataggtaaagaaagggaaggagtaaagaagaagaacgcaagatctgaacttcaaatcctctccagataaacagtcttctgactgtgggaagcaaactttggccttgtccaaagccacacgtgtaaaacttgtttgttctcttcttgcctgttctttaacaagccaaactataaagaatagtaataaaagcccacatttgacatcaaaccatgcttttatgttgacagtctttccaacttctattaaatttcctttttctttttaaaagattttacattagttcatcaattgattgattgtgtgtgtgtgtgtgtgtgtgtgtgtgtgtgtgtgtgtgtacatgtcttccataactaaggagcatttgacagttggtagcttctagaaaggcagtgtctggtttcttcagtaatgtggccttgtataggtcagcaatgctctatgcatagtacatacaattggattcaacatcgtataaaagtaataataaaaaactgtattatttttttactaaaaatattactgcttttcaattttgagtatagagagctactctgtagaactaccctgcctaggtatttctgtttagttttctatattataatgagaggtacttgtacatatatttattgacatcatattccaaaaagtttgaggaattcttaccccagttcaaacattctctaatatactatgctaatttttaaggcaaccaagtccctcttacaactgtgttaatttaatcctatcctggttcttttcatccagttctctatcagcctcgaatcatgcaaatacctatgttccatttcctggaacttctgacatttcagtttgtgttcaatgatttcttgctgtgatctttagtatctgacagttggaacaccatcattatcctgtttctaactctagttataatgtctctgacaaaagtgaatcattgcagtgaaggctcttaatagagacattactgtggcaataaaagatgtaaattgcaatttcaaacaatctacaagagctatgatggaagcagtgatcagtcctttgatgaactgcaagtagatttctatacagtgtggtcagatttgtcacttatgcaaggaagaatagaaacttagtagtttatacttatgttttctatgtgtctgtgtatgtgtgtatatgtgtatgggtatacaggtgcccacagtgtccaaaagggaacatcagatcctctggagctaaactgtgaatcacactaataggggctgagaaccaaagtcttgtcctctaggagagcagtggacattcttaacctcttactgttctctctggcatgaaatgcaactttttttttttctgagacagggtttctctgtgtagccctggctgtcctggaactcactttgtagaccaggctggccttgaactcagaaatccacctgcctctgcctcccaagtgctggataaaagctgtgcgcctgcttttcctaaggtcctgagttcaaatcccagcaaccacatggtggcttacaacaatctgtaatgagatctgatgcccacttctggggtgtctgaagacagctacagtatacttacctataataaagaaatgcagcctcttaaaagaagagaattagaacaggaactttggcatatgtattttgaggaaggagaagggagaggtaaagttgttatagcaagttcagttaaacatgtgtgaagaaaaaaaatgagaaacacattcagaggatacaaaactgttgtcatcttggtctggggccctaagtatagcatgctgtacaaagagcatgagtttgaagagagtccaggctatctagagtaacctcctctgaaggactacacgtgataatacaaataaatatagtgggaaacagtattaactataactgtaatgttagtgacgaacacattgggtgaggaagaaatgtttccccattttacaaagggatagattgaaattaagcataagcatccatttaatgctcatctattagagatgaggctgatagtcaaccctgttctgatatctttcacaaactcaagcataccgtagttaaaattgatacatctggtcctggtgacatatctcagagttaaacttacctttaaacttgaaatatgagtttagataccagacccaatgcaaaaaaatggcacagtgatatgtatgtgtaatttcagctgctggnnnnnnnnnnnnnnnnnnnnnnnnnnnnnnnnnnnnnnnnnnnnnnnnnnnnnnnnnnnnnnnnnnnnnnnnnnnnnnnnnnnnnnnnnnnnnnnnnnnnnnnnnnnnnnnnnnnnnnnnnnnnnnnnnnnnnnnnnnnnnnnnnnnnnnnnnnnnnnnnnnnnnnnnnnnnnnnnnnnnnnnnnnnnnnnnnnnnnnnnnnnnnnnnnnnnnnnnnnnnnacacacacacacacacacacacacaccacacacacacacacacacacacacacacacacacacacaaacacacacgcaaacgcaaacacaaacacacaggcaaatatatacacatacgcgtacacagacacacagacacagaaacatgcatacacattacttgtatatatacacagagaaaagatacagcatgaagctaatctctcaacattttctcatttttcaatgctatcattgactttaaatctctgatgaatttttcagtcaccttctttctaccctcaaacactaacagaaaatcttcttatagcttccaagtgcctgtgtctgttcctttcactttaacttcttgagattgtttgtttaacttgtcgcaggttctcctgacccctaatatatagggtagcctcagatctgacttactttcaatccatttgccaaaacaaacttctatatacaaagcagatcttactcccttttgccttcagtgtcaggattcctgataatctctgccacaatgaagggttgataatgtggccttaataggaagttgccatccaagccctcatctccatcttctctggagccttcaaagcaacttgatgtttttctggtggttttctcatgagttcactcaagtggaaaatgatagaccatgaatctttcacctacattcttcaagtgtgtgataggtttaggcttttattcttaagccctcatcaagggctgctttcctcacacccatccttaggtccattgctactttctcataattgtgcaaactgccaagccccagggagaatagccatcccccacaatgaaaattattccagggcaatttttaaaacatataattttaagttagcatctggttttctaacttttcttaaaagcatatctatctttctttctttctttctttctttctttctttctttctttctttctttctttctttcttccttccttccttccttccttccttccttccttccttcctttctttctttctttctttctttctttctttctttcttttttaaacaacactatacatttcctgtatgctcaggagaagctagcactggcttctgctcttctgagagagtccagtgagtcattctcaccctggaagccacagcctttctttaagcacattgtctctacagtctgttcggtttcacatggcagctctgtaatggaccacagaggtgcctgctgcttatcttactctagccaatatggcatgaaaatctgcctagtggggtacctttttacctggtaaagccttcagaggccttgatgcttctcatatggtgaatgatctgtgtcgagctgagtgatgccagacttgtaagaggctgcacatgttcctcgggtgcctcagatacatcacccttattgattggtccagtagaccatgtgcattactcttttacttatccttttgcctctctttaaaggaacttgctgaaatttagaagtcaaaccttttattaccctccaggacaatgggctcaaatagtcactggtaggcattatggtttaataatgctaaatacatacaaaaattctttgttgttctgaagagatggcttaatcaataaacattaatacccagggttgattcccagaacccaggcagttgtggcatgcttattatcccagcattagtaaaataggatgtagacacagggggattcctagaatcaacaagctagctagcctggcctatttgggtatgatctaggccagtgagaaaccctgactcaaaaaatgggagggcactgagcagcaattatcttatattgtgttttggcttctacacaggagtatgtacttacaacacactgtttctacatccctttatctcagcaaggaattagttgtgaaggcagcattaaagttactaaaataaacttccccaaactcatatttattcttgctgtggttggggctttgcctatgatgtccagaagaaggttttgtgtcatcttgagctacaattacaggctcttgtggatgttgaaagcagcactccagtgctctggaaaagcagcagtcattcctaactgctagccatcactgtacaacccccatctaacaggcctgatttgaaggcttatccaattgagactcaacagaattatattaaaattcacaattaaggccagtgtcaagaagctctccttactgccagaaagaaacctttctctgatgtgcaagagataataatagaaatgctttatagcaatggctctccatcttcctaatgttgtcacactttaatatagttttgcatgttgtggtgacccccaaccacaaaattattttgttgccacttcataactctaattttgttatggttaagaatagtaatgtaaatatctggtatttgaaacctgtcagaggaccttttgatatctcataaggtacaggacccacaggatgaaaaccactgctttaaagtataataaatttgtgtaagacctccagcattccttgaataaactgataggttgtgttgtgtgtgtatatgcatatatgtgtgcatatgcaggcataaagactagagggtctgaagtgtcctgctatatagcattccatcttattctattgtcattgagtctttcattaaaactgatgttaacctggcagctagcaagtttatgtatacaccgttatctctacagtgcaaggattatgggtgcacaaggtagcactagccttttatatgggggtttagggatgtgaacttaggtcctcatgttttttttctgtgcaggttttcaatcacttaactgtctctctagctctaaaatgagtttccaatgttattttcacattaagggtccttgaatcctaggtgaccattgctaggctctagttttcagcagcttgtgcccctgcaaaggtatttggaacgattcccagtttgtgtgcagccaaagctggagggagtacagtgataattaacaaagtgtcagactggataatgggaggaactgtaaagacactaaaatgttgttaccaaggcccagacgcacctgtgaaaacaggaagttaatttgtgtgaagaatctcgcatggggtggaggagacaaagcatgtgagatttcttttaaaaaattcatactagacagaaacaaaaatctccaaaaaaaaaaaaaaaaaaaaaaaaagaaaagaaaagaaaagaaaaaagaatgaaagcagcaaagagcaaacaacaccctctggctggtgagataactcaaggtctgggagaggggccctcttggactctctttgcccctctgtcaccttgagacaaagtcaccatctttgatagtggagttttctaatccctaggacagaagttgagacattgatctcatagcaggtttttaaatagcagtggggctttgcatactgtccatttcgtcacctctttaaataacaatatacttgctaagactgcagtgccagcacaggtgaccttgttgattggatgttaagttccttttaggttagttcctctgaatttttaccacataagatgcctggcaaatacaaaagtggatgctcacagtcatctatcagatggagcccctaatgaagatgctagagaaagtacccaaggagctaaaggggtctgcaatcctataggaggatcaacaatatgagctaaccagtaccccccccccagaactatgtacctagttgcatatgtagcaaaagatggcctagttgcccatcaatgggaggagaggccctgttcttgctacttgactcctgcagcttgatgctggcattcccctgatcatatgcctcagtacaggggaatgccagggtcaagcagtgcgagtgggtgggttggggagcagggtgggggggaggcggcggtatacctgacttttgggatagcatttgaaatgtaaatgaagaaatataataataataataataataataataataataataataataataataacaacaacaacatgttaggcagaggggcagagggaggagtaaaaggtgatgaacgaggatcttagtcacatttggttagccccaagaactgttgggcatcactgacaatctctgagaggtggagaatatgcgtgtgacatgacctgcttgatgagcagcagctggtgattggaatgctgttattactgtccgttatctttaaatattgattctttataagtaaacacagaatggtgtggatgattgactgctggtgctgaagattggacataggccaactaaggagaagaacttgcaactctcagggttgtactctgaccagtcactgtggccactctattctctttgtatatgactcagaatgaacgaggagctaagttatttctgagagtagttgtctgcccacattaaacaacaatacaacaacagcagcaaatcaaaaacaaacaaaacattgttttctgcaatgctcctaaaactcagtgaatcagattaaaagaaaaatcaaaatttattttccaaaataaaagcttccctgaaatccgaacagaaaaagagagtaagcaggtcagtccaattacagcctgaatggcattccccggaatgtagtcttcacacaggggtaacgtgaagtcgcctgatgggaaccagtccatcttttaattgtcctgtctctccttgcttctgcttcacagagaaggtgaatggaactgacagactacttttgcatggatactcattgttcctacttctttttaaagatcttcacagtctttgaatacaaaccctttggcccctcctgctgaattacttattataattttatagagaatgtaaaattccagaaatgaaaataaagccaatacacacccttaaattgtaattttattcttgaaaataacacataaatattcctccattccactgaattttgacaacacacataccaaatgccagcagttggaggttccatgatactaagctgccactcttagattctgactaaaaaatccctcatccaacctgactgcatgttggggatctgctgttatctcttctagtttggaaattcttcagtggtgttggattttagtgatgaggagaaaagggggagaagggtggagctgtacagaaagcactgaatgttctgaaagagatctttagctctcaccccagacaaagcacattgtctcctttcaaagatttcctataataaagtggggcaggttgttgcaaaataaggagggcttattataaggcctgtgctctaagacccaggtaaagaaacttgatatatgtgatgtaaggtatgtgacaggggtcgctccctcttagcctccctcttagaggagaagaatggagcagcatggtttatgtgtgacccatgctgtgtaacagtggccaggttgccttcgatccccaagatacaggagtctgagttgttcaagccttgctgtcattcctttctacttagagcctagtaatctacagtgcctggttctcacagaagtaagtagagggcaagcctaaggatactgattcattataaaggatgaaaatgcagaggcagatgacaagatccaaagaaaatggcagacagggaaaggtactgaccaccagggtctctgacttggatttggaatacaccattatccccaaactcctttaatctcaatgtgcagaattagctggattatttgctccatgtccttgtatcagttcaaatatcataactgagatgtttgagccttaatgtccacagtttgaatgcaaccccttccttcccatatcttaaggtaccactggaaaggagaaaaggggtagggccaacaaggaaagggaagaagagaaacatatctctaccttcttctattttccttagagagttttgtatgaacataaagtaatgttcaaagtagaactaagttatacaaagtaatttacataggcatgtctcagcaaataccatgcaaacagcctagtctgtttaaagtaacttagactattaatttttgttcctgtcaagtcaacgattttcctgtcttcccctttgatttgaatgcaacaattacctatatttcatgtagagtcatttctacccttctatgtattgaactatcatcatgcattttaaattaccactgtcacaaagtcagttcaattgttaaatggcaagctcagaatccatcagtacattgtacttacaataattgtttggtatcaaatacaattagttacatatttgtactgtatctgctttaccctgggaattccctttaaagaaagtttgtttttgatggatcttttattacaaatgctcaaggaagtaaataggaaaaaaaaaaatcattcagaaaatggcaacagagaattttaataatgtatcttttatttctagtaacacaatataaagcattgtggatatttcagaatttcaatgaacctttacaaatgtaaaagcatgtgggcacatgtgcatttgaggtatacatatgtgtgtgtcaaaaataagtatacatctcacaaatacatatagagagtaacacagagtctgtgtttgtattggtgcatgtgtgtgtcaaataaaaatatatactttgtaaacacatctacatagagagcaatacacagacagagagagagtggggtgcaagcgagaaagaagaggcgaggaatgtgcctgtgcaaccctagttggacatcacttgtcgtctagattgacaacaaatttggaaagtggcccttctgcgtctatctccccaggtttggatttatggatatgagccaccacacctggatcaacatttttttttattttgtttgagacagagtctcatataggccaaactgtggtttataatattgtaagaggttctcaagaattaacaaattaattttcaaaataatgaaagtttacatttcagaacattatgttgacaatgtgcttaatgattgaaaatgaacttgaacttgtgattcttcagcctctactcccccaatgtccgtttttgcattaacagggatgggatacaggacttctgtgtgcatgtcaagatctgtagcaaaacagcatcatcccaaccccatttttccttgatcataaaaatattggtttttaagtcttagcatataaaatggcttttttcatgtgtttttaatgaactcttggatatatttaaaaatattttattaactgattttgatacagtgattatgaaaatatacacaagactaacactaactcaagccagacaaaaatcacagaatctagggaagaaggtgagaaagaaaccttccactagctgaggagctatttgtatctgatatctgctgggagggagagaggaagctttctgaaatgctgtaatcactggtatgtcaaccacatgacagacaagtctcattcccaaaactagatgagctataaaaactggactgtgtggggaaacaaaaaaaggaaagaaccaactaaatgttgaggagggaggatgggaaggtagaatggacaatgatgagaaaagtttggagcagtgtcctattccaaattatattgtataaaattattatcacagaattagcaaaattaaatttcaaaggaatgaaagtttccatttcagattattttgacaaattgagatttaccttatgcttcatatccatactcaagtcacttcttctgttattcatctctgtaaaataatcattcctttctttcttttggttcttctaggtaacgtttaaagcctccagacactcactttccccagatttaaagtatgttctcctggcatacgacgttaagcaggtaaaggaactcttgtgcttctactgagctttttctctgtggacactgagacagctagtttatatttaaacttagaagtgctcaagcaaggtgagtgtggctgtggtaaagacaagactgaaattgagatggttgactagcaaatcactggaacaatctgtcaggtgagagttacaagtgcatgaggttttagcaagtgtgacagaggtatgctggttttcaggataagccctttagagtcagtggaattagagggcatatataggacagagacgttcctactggatatgtcctgggctgcaatgtatacacaaagagaactgtttcaaataatgatcagtatatgctttggtagtattttaaggatttcattatatttgtgtgtgtgtgtggggggggggtattggtggttttcataatgtgaatgacggtcagagggtcacttagagagtggattttctcttcctaccatctgagtcctagagactgaattaagtaaggtactaaggtcattactcttagtggcaaatgcctttattcactgagacatcttgccaagccaggatatggatttgttgttgctgctgttaatgtattgctgaaattgtgtggaatctgaagtgtctattcgtacaatatagcaattgaggtcatcacacactgaactactttgccagctggtggtaatttataaatatctgtgtcgtgtgtgtgtgtgtgtgtgtgtatgtgcgcccgcgtgtgcgcgcacatgcacatatgtgtgtgtatgtatgtgtatgtatatatatatatatatatatatatatatgtatgtatatatgtatgtatgtatgtatatatatatatatatatatatatatatattaaatgaacatctatgtatacatttgtataaatgctgatatatgcatgacagggaacataaattgagatcagcagcaacctgtgtgttactcctcgacttccatcttctttaagacaggaactttttgctttttctctgtttctatgtaccaggaatactgtctgtaagcttttgtggattctcctgtcttctgcccccactgccctgtggaagcaatggagtcacagactttgtatcatgtgtcagttttgctggcattctgaggatttaaagtcaggtcatcaggttttcatggccagtgcttttatccactgagctgtctacccagcactgttgatagcatttgatgtcatctgcgttgtgtcagaaagtagaacaacaaacgaaattaaccaattataataatcttttctcagtcactgtttgattattctactccagctttggagtacaattagaacatacataaggcaagtgagtattttgtagagttaaaaagaaaagtaagtgttaacaggcaattcggcacattagattctatagtgagtaaatgatgggagattactcaaggaagttttatgagctttaggacagacaataaaaatttatggagttaaggcaggaagtttcatataacgcatcaaagtctttggacacatggcatttcacagttcagaagacttgctgtttaatgcattagccttttggagtgtacgtctgatgtgtatctttaaagtttatatttatactgaaaaataaattattatgaaaaagattgtgacattatcattacaagcttatctacctgttaagtttcttcgtgtttttggctgactggtgttttctttgtgtttcttgcatttgcagcttttgtaaggtacttgttatagtgagaaaaaatgtgttttttaatatgagaaaacataataaaatacactccaaagttacaaaataatgctatctaaaagaatttaaatttgacctgatgtataaaagaaatattgaaattttatcttttgattatgtttgaattctctatttagttctacactccattttttgattgggttgtttggtttactggtggttagcttcttgagtactctatatattttggatattagccctcgatcagatgttgtcaattcttgatcttagagcatgaggcattagagaactctttaggaaatttccccctgtgccaatgagttcaagacttttttcccactttctcttctattagactcagtgcattaggttttttgttgatctttgatccacttggacttgagctttttgcaaggtggcaaatatgcacttattttcatttatctacatattgacagccagttagaccagcacctttgttgaagatgcttacttgtttccattgtatatgtttggcttctttgtcaaagctcaagtgcccataagttttatttctgggtcttcaatactattgcactgatcaacttgtctgtctctataccaatagcatgcagttttggatatatgtggttttgtgtgtgtgtgtgtgtgtgtgtgtgtgtgtgtgtgtgtgtgtgtgttggtacctgtgtggtagtgagtttatgggaatttcttctctctcctactacataggtaccaaatattgaatttagccttgttggcaaatatctttacctgcagatccagcttgctgacccagtgaacactggtatgtaagcatgtggaagcagtcatggaaatcaagactggaactgtcaacaagataaacattcatagcaataacagagaatccagaactcagaaatgggcttttgaatgtaggcaagtgaattttggaagagaaatctgatcgatgctgggaggacttgtcacaataggctgtggacttacctgccaccacttggtgcatttagtctgttccgtgtactttttgatactgtgttatatgaaactctattttcctttaaaaaatctttttagagattaaaatataatcttttcaacaaatgatgctggagtgattagatatccataagcagaaagaaaataagaaacccgcaagatagcttagtgggtgaagttgcttgttgcttgccaccaagcctgataatctgaatttcagccctgggacccatatagtaggagaagagaatttttaaagatatatataaaataccgtgtatgtgtgtgtatatatatatgtacacacacacacacacacacacacacacacacacacacacatatatatatatatatacatccatatacacatgatatatatacaaggaagttgtagctgtcttcagaaacaatggaagatgttattagactccattacagatggttgtgaggcagcatgtgcatggttgtttggaattgaactcaagacctctggaagagcaagtcattgctcttaaccactgagtcttatctccagtccctactgattaatttttaacacaggtctcactctgtaatgatataaccaaagattgctttaaaaatctgtacttttattttttaattattacttgggggacttgaatacagttcaatttgttgatggagtgctctgctagcatacataaagccttgtatttaatcaccaaccaccacataaataaagcatggtggtacatgcctatattcccagcactatagatgtagaggaagaggatacagagttcaaagttcttggcaacatagaaagtttgagacaagttgggaatacacaagatcctgtttatcaccttaaataacccagatattcttttgttggtaaacagttaaatggttaagaaccatgcagagtatataactcagaaatataaaggaaaaggatttgatatatccaagaccatgggtgcctctccagagttacacatgagttttaaaaggcaacccccaaatctcctgagtgtctgcttccatttatataacattctggaaataagaatgttgagaggtggaaagacagagaaagaatttttcaggcataaggtcaaagtgaaaacagttctctttattttgtgtagcaatttttgtgttcttagtggggagaaaaatcttctggttattgactctgtcagtaccctggattcttacaccatagtgtttaaaaactgttttggttattatttagaatgatttaaagttcatgttttattcccctattacttttacacatatgtctgtatatggaaacatatgtaccacagtatgtgtttaaaggtcagaggataacgagtaggaatcagatccctctttccatactgtgtcccagggatcgaactcaagccgcccggtatcaaacgcctcctcctacaaagccatcttcccagctcttgcacattaggtgaaactagtagaaggaaaagtcgcacttccattcaagcacactttataactacatatgaatttataattaactccaaataaaaacatctaattagtcaaaagatctatttgaaatttttcctaaaacttaaaatttatataaaaaaaataaggtccaatttatttaatcaactatgtaaattatataaaatctttgaactttttgcttatgtgagttcccggaaatagatgagtatgattttttgtacttgtttacatattaatttttcaggctaatcttgcagaatttgaaagatttctgaatgagacaggttaaaaatagaaaagcagatcacatactaaacacactcagttatcagttcatgaatatctcattcttctctctgttgagcacttacctgtcttgggggaatgtccaatgtcagtacattccaagtggttatattgaatatttctgtggatatttgaataagaattcccacacaggctcatatatttgaacgcttaatcatcatggagttgaattatttgaaagggttatgcagattatgaggtgtgtccttgttagggaaagcatgtcactgggagagggctttgcagtttcaaaagtgcatgctaagccaagtctgtctgtctgtctgtctatctgtctccctctttctctctctctgtctgtctgtttctgtctgtctctgtgtctatctctctctgcctctctctctgtcaatctgtctctctctccattgtttttctttaatgtttcaaatccctgtgttcctgaattatatactcacctattgaagcttagctctgctctgatctactttatccttccaaattgttgcttatttttccagattagatttatgttttgttagggtccaagaaatagccacatattcagacaccagtctcagtcaagtgttgattattgatcaatatacattccaagcaagagtcaagattgaaatcttcgaccctgggaagtcctcagaaccagtattttatgggaaaaaaaaaaccagcaaacagctgcatttgcaacatatctttatctaaacaaagcagctcagtctcacatttaagctgatagcctgggtttagagaccagaggaactccaaagtccaacaacaagactttatcagggcaggaaacaatgggtcacactaaggttgtgagctacaaaatgaaggttgtgagaatatgcttagttttactatgtaatatgtataggactagaaatccctcagttgataaaggcacctaccactaagctgataacctgtgttcaattcaatggatccacatattgaagggaaagagtatatttatgtgtattgccctcttgatgcttttggacccccacaagtacatagatgtgcaaacacatacactaaaatacgtagataaaaatataattagaattacatgtcacaaaatggctcatgctttgaatttataaggaaatacacatttgtattcagattgtcaatgcataaatatttatgggtatgtaagacatataaaaacctttttttgtatattttaaatctagcttgagggattatgtaaagcaaacatgtccatgcaaccatcatctggattaagaaagcaaagctttctagaactgcattctaaccacttgcattggaaatcactgtctacatttcactgcttagctttgatgattttatatttgatataaatagtctcatgaagtatattatgaggtgtatattctttcttatctaagatttaatatccatggttctcagaggttctatgattgattcttctgtagtacactagataccaagggtgatccactccactgctaatgtaagctgtgaaaactgcacatgtgttacaggttcagattattacaggttttccttttctctccctttttactgtgtgtgacctgactttttctttacctctattgaagcaaatatatagaagtcagagaaaactgctaagcactcaaattagcctacccaagtgggaatgctgttcatgatcctaaacctcacagagtgctcacaacttggatgttgataccatattctaaggagaaggcaggatcagaaatgtttaccatttacttggacgctttcctctggcataggggtgggtccacccttctaattccagcagctctggcctttccatcagaacataaattcaaaaaccatcaaggattaatctgggaacacataaaatatttcattgattataaactaaattttaattaattaaagttaacgaaactcccattacatatactgtagttttaatgttttgtatactatttgtgtttgagtgcatatacatgtcacaatgtacaaacagaaggcagatgatagcttgcaagagtcaatattctgtttgtaagggggtttctggttgtcaggcttggtagaaagcacttttccctgctaaaccatctcagggaccaggcctacattactttggatactcaagtggcattagtgatatttttctaggcttagacattgtacatctttatacttcaaatttttccttaaacagtaactatctaaatgacataaactgaaactattttaaacaatttaactagagcattttattataattgtgtgtgtgtgtgtgtgtgtgtgtgtgtgtacgtgtgtgtcctgcacacacaatcatgtaaaggtttgctgcttatgtcatattgccctctgtttgatacactacatgctctctagagggtatttgctgctacccagacttggctgcatccacactaccctgtaggtctatagacagagtcctctttatgataaatatctattttaacgaagaagtaatcgctgtaaaatgaatcaggcacgcaccactgcttgaaaaagtaactcttctctagtgaattatctaattaaattctgggtcttaatacttcaatgctttacaattacccagacatctttaagaagtctgtgggagtagagtctggccatgggattgtctaggccattaagcttcatacatttggggtgtactgctattttgactaatcttgttactgatgaacttacagagacacctggggagatagctcagtggataatagtattttctgaacaagtattagtacctaactttagacccccagaacccacttataaaagcagttatggctatgctttagtgttaagagagtggaggtagaaaaaggaggatgctgggactggctggctcactgtcagcctgggtccagtttcagagagaaatattgtcttgaatgaggtagagagtgataaagtagaatacctgaggtcctcacattccctgcacatacatgtgtgcctacacagacatacacaatcacatacaataacaagattaggggaagcacagtctatatttggatatatggtacagcttctgcatcctcaaatcttgccatctttctcctgttttagctgctgttgccaaactgtttgcctaccaaactttctccttatttgaatcaagttgataatactggaacaacatcaatatattttatacacttgtccatatgtataaatatatagctagataaaagctacatatttctctctgggagaaaaataaagaatttgaagagtcctggaagctgatctgcattttatgaactagctactctcttactcatcatttcatcccaaatggagccatctagtttgaaataggatttgtcattttttattaaatattcattatatttatttattttatgagtaagtatataggcaattatgcatgacatgttgcatgtgtgtaagtcaaaagaccacttgcaagagtctgttctatccttctaacatatggttctaagggatcaaaattgagacttcagatttgacagtaattgccttaacccactaaaccatcttgacagtctagttctagattttatgctttagggataagtggggagtctgaaaatgatctgcctctataggtttccatatattataacattgacatgatttgatgtaggcattactatgacagccatctacatatataaatacatagattggtattagtcaactaaatccctgcctatgtgcatgtatatatgtcagtacaccatacatgtgtgtatatgtgtgcatgtctgtgtgtatctctctctctctctctctctctgtgtgtgtgtgtgtgtgtgtgtgtgtgtctgcgtgtctgcgtgtctgtgtgtctgcatgtctgttcacgaaaaggtgagcatgttgaggccagaggtccatgtcctatgtcttcctcaatcacatttctgttttatttattgagatagaatctctgtctgaacctagacctcactacttaaggtaggctatctggctttcaaggactaagaatttacttgtctctacattccaagtgcttggattcgagatttgtacaccacaatacacagaattttacctaagtgccatgaatacaaaatgaagccttcatgattgcagggaaaatagtttattgactgagccatttcttatgagctctgatcacagaaattttagtaaatgaatgtattataattcattatgtagaagaaaatatattcattgtttcctaagcttacacacagtattcatctatgattcatcttatcatagatcactttaaattttcagaggatacaataaaatactacattagcaaaataatctcactgtcaaataggactggctatataatattgacttcataccaaactattgacctgaaacagtaatttattgtgagtataaatgctttgggtctagaaatcttgaagagattggctttagagggccagcatgatatactttctgcgaatgatgactgagatggtagctgtggacatcgtgtgcattgactgagttgaaggaaggacatctctactcctttactcacatagttgacaagttaactggctgccagcccagagtctcagtggttttcatgtgaccctcgccgggggctacttgaatgtccacatggcatgacatctggcttgtcccagagtggtgatttggcagagccaggtggtgtctgcaatgccttaaaaaataatctacccttaaacctcatcaattatttctcccattgtcctctgtcgtacaggaacagctgtgccaccaggtgggaagtgctatgataaggggtgtaagttgtgggatgggagtcatggctgactctttaggccaatgaatggctcttttggccgtcatccacctagagacggagcagttgaactgtataatggctcagtgtaatatgcaatggtatcaccttgcagacatcaatttgaaaatgcgtgtgtttctcaatctggctagccgatttttgaattgactcaacaatagagaattttcccagaaatgtcatattgaaagagagaaagccctccagtcagagggactacttcttttcctcaaagagatttagaatttgtcagaccaccttataggaaaattctgaagcccagataatatcaagtcagtggtgtgtgggaccacacctcgactaggcctacttatatgttcatatcagtatttctttatttaaacctcagagtcactctagggcttagcatggacatgagggtcacaggatctctttgtttttcttgccattgtggtcatattaagtaaaatctccttttataatatatctttctcattattaatttgctgttataaatattttattttaaaatatatatggacatatgtttctccctgtgggtctgtgcttgagagtgaagtatctacaaaatccagaagagggcattagatcccatggagctggagttacaggcagttgtaacctggtgtgtgtgggagagggaggagaacttaactgaagtcctctgccagagtagcatccactcttaatgaagagccatttctcagtaccataatttacttactttaattagcttcttaagaacagttggctagtctgtacttcgtggggtataaactgtgaccacaagaaggtaacaccctcaaagttaggtatagattacaagatgtatgctattgaaatgacgtagcttagaagccagctgagcagtcataaagaaagagcttgttttgtatttgtgacaaccactgcttatcctacataagctggccctgttttcatagcttgcgtgtgtgtatgtgtgtgtgtgtgtgtgtgtgtgtgtgtgtgtgtgagagagagagagagagagagagagagagagagagagagagagagagagagagagaaagagagagagagagtttaaataaaattttaaaaatcacaggattgaagatgatatggtttagtaaattacagaattaatatcatgtgtaattgaggtgtaattcagtccaaaataataaggaaaggctctgggtctcaagttcaagggcaataatgagccagactggccttcttaggtaagagcttgatttacagttattactgctacagaggaggaatcagcagcaggtcaggagctctggggagagctcaggcccacgtggcagaatggtgaacaggagcccaaaggtttccttaatctgtttcatgccatagctagctgttgctgaaagtaacctactgatgctaagttaaagaatgccaggtgatgaagctaatcttgtggttcacggtggcagctagacaacacgctagagaagtaagttgctttatttctggaaaccaaattattatagttacatctgttattagagttcaaccaaaatagcattttcttaagttaatacattccaaaagttttcacctgatagtcacagttatgctagatcagacaccaaggtgagaaagaaatggcttacgaaattggctaaataaagcctgaggtaagattcagtctggttctggagctgcagcatgccagctgtgccacaattctagacgttcccaccaattaatgaactttgcaggaggttcagtagacgatgtggatctctccaaacctctgtgcatggactcttcagtctcaacttgccacaaaatggaaacgataaggactttctcattgcagaaaggaaaacttttcacatcaaagtattatagagagaggtcacacacctgccaagatttccagcttccagtgccctgaaagaattggacaagagacacaaaaacaggaataggaagagagactatgccttcttcaataggagtagatggaggccttgtttgcacatgcttagttttgttacatgtagcctcagtgggaaagatttcaaatcatgctcctatcagaatttttttcttattagatatttatcctcatattactctactgccaaaaaggggcaacagggagccagactcagacccacataacaaaggtgtccttaaggatgccatagaattcagtgtggatgtagcagtccttctttgttatttttaatgcagatgaatatttgccatattaagtacaggacaagggtatcttgaggagatgattgttgtcaaggttaaatcccagtgccttccattaatcccccaaaggtagcagtctaccttctgacacccatcatactaatacatactcaggggaaaaagctatgtctttgcaactaatatgtcagatttgaaattctacagatcatagaattgttgccttggtgctaaaccattagggacagattgttctatttagttgtgtccattctgaagaacatcaaatacagaataacttgtcctaaaatagcgacaacaataattcttagtgtaaatgaaaaatcccaagtaagacttcaaacaatagagaataaaggagcatcataaatcctagagccacactttctgattacgccaacagagcagtgtttggatttctaattggagttaacactaattaactttgcattgctttagtgttgcctttttcaaaaagaaaacagttaatgattgtacaagaaaaaaagctagctcacaggtagtggtgtagcctggagggcatctacattaaccaaatggaaaggacctcaatgtttctgaggaaagaggggtgaagaatataattagagtcaaaaggccaatgtatttttgaaagccctcaactggaaaataaccaaggtttattataaagaaatttattttgggattgggggggctcagtgggcagaatcatagggataagaatcataggcagaaacatagcttaaggatctgtgagagacattcttgcaaggtaatagaggaggatgctcacagccaatcattggactgagcacagaaaccccaatggagcagttagggaaaggactggagaagctgaaagggtttgcatccccataggaagaacaacaatatcaaccaaccagaccccccaaagctcccagggactaaaccaccaaccaaagagtacacatggtggaacccatggctccaggcacatatgtagcagaggatggccttgtttgatatcaatgggaggagagagcctcggttctgtgaaggcttgatgccccagggtaggggaatgccagggtggtgaggtgtgagtgggtgggtaggataggggatgtgataggggatttccagaggggaaactgggaaagggggctaacatttgaaatgtaaataaataaaatatccaataaaaatctcacaatgaggtaggtgtaaggacaagatttattttttagttggtttttatgtacttcttctttcaactatggattcatatgaatctgtagaacaggagattgccactgggactacaggtcctgggttctctgcctcaggggcaccatttttgatagagtgtaaagaagagagtgcgtgggaaacccagtataatgtgaaaacgtggctgaagtaatggcccagcagttaagagcatttcttcttccaaaggatatgagttcggtgttcagcatctacaggtgtagattagatcacaatcacttgtcactccaattcttggaaatccaatatcctcctctggtctcaataggctcctttactcacagacacacacatagacacacagatacagacacacagacacacagacacacacacacacacagacacagnnnnnnnnnnnnnnnnnnnnnnnnnnnnnnnnnnnnnnnnnnnnnnnnnnnnnnnnnnnnnnnnnnnnnnnnnnnnnnnnnnnnnnnnnnnnnnnnnnnnaagtacagtagattttttttacataagggcagtctgtattctactgaaatttgtgtccctagttaaacctatatataatgtaagtaattcttttgaaataaaatgttcaccagagtactagtggtgtgcacgcatgtgtgtgtgtgtgtatgcataatgggggtcatcaaacaacttgtatcaaactgatgtggcaagtgcctttaattgctaaggcaacccaccagcttcctgttaattgctataaatcaaagagaatgatgcagataaatgcaaagcagggtatagaatgtcatagatctgcagggatagttgaagacttgtaacccggagggctcagacccaaagtgtccatcttaggaactgagaagacattattgaacatacataggggagaatttcaaagacaggatccttatttagcaacacttcagaatgacaaggatgcagtgtatttgagacagcgtgtgagtcagagatcatgaagagatgccaagacttgaagactgttcttgaccaacatgactgctgactgtgcagacaggagtgacccaaccaacatttatccataatgttactccttatttctcaaaatagaaaggactcatttctttcctaggattgtagcaaaaaaaagctactttttaaaaatctaacttcaaaaataactaaaagaacttaatattcagcatgtgaaatgtttgtgttgatttatatcaaacatataagaaacacaagcatgaaaagaagagcacagatattcattctattactactcatcatgggtgacagctcctgaattcagagcttactctggggcacaaaaggcatagaattttctgggaaaaaatgttatatcctatgactcacaggatatttcatcaaggtggggtcctcctacccagtaaagagcatcatagtcaagactggaatgcagatgaagtctttcttaacagattgtatctctggttctttgaggtcatgtcagatggcaaacactaaatgggtctgccagaaaattccagtccatttgggaaattatatgacttaagccaagtctgagtcttttactctgtcaaagaattgaaggggtggaagtcgttttgacaggtctcaaaagcatcttagtaaatgaaccaagcagaagaagccacacttgctgatgttaatggaaagactatgttgaacttgagcaggaggccagggatcatctttggacattaatacatatgcagaaacaataagggatagtgtgaaatcagccaaaatacatagaaatccaatctgttaagccaaaagtgaaagtatgcacccattaaaaactctgattgtgtgcatgtgtatttgtgtgtgtnnnnnnnnnnnnnnnnnnnnnnnnnatcaaattatgatgaacatgtacaaaaaacatgcaagggaaagtgtattgctcttctttaatgccttctagtttcttttttttttttgggtgcttttagcatgatggttatttgtgtgtgtgtgtgtgtgtgtgtgtgtgtgtgtgtgtgtgtgtgtgtgtgtgtgtgcacacatagagagagagagagagagagagagagagagagagagaggctggctattgggagcatgtacatttgtcagtacaggtgcctacagaagcctgaaaagtctttcggatcccctgaagctagtggctgctagatataggtgctgtgacccagattccagacctctggatgagcatcagatgttcttaaaggctaagccatctttccagatccatgttacattaacattgaatagctttgcacttgattttcaaaaaggaacaaaaatttgcacacttgaaaaagaaaaggtttactcctactgagccggtaaaaacaaaaacaaaagcacagcaaaacaaaaacaaaaaccataaagctgtgaagaaacacgacctgccccctcacctcccattctctcattcattcttcgctctccacaactatttctttcttttgttgtgcatgctcatgtgtgcatactgcattctatgtacagaggctacaaaacaacgtgcaagttttcttctgccaccatgtaggccctgggatttaaactcaggttatcaggcttcactggaaacaatttacccactcagccatctctcatccttctcagactgtcttctttccgtaaacataagaaagcagacattgagaaataagctacactgcactatgtaatgctgttgataacattgtgttaaaacaacactaaagattaaagttcttcatgatgcccaagtgtaggactttaaacaacggttagggagctgttgatagagtcacctcctggaattcaaattttgctttccttggaagagttaccatttcttgttttatttttttttctataactccctatagcaacctgttgcctgtatgtctaagatgaagaataaacagttatgaattttgtaagtttgtaaatgtgaagatcagctccaaactctattttttttaaaatgagatggactctggaagcataacctcaggcaaggtgctttgccttaacagtcacaggtcaagaacctccttatttagctctccgtccctgtgaagaaaaggacgtcaggtatcactgaatctggctccgtttagggtctagattatgtagtcaaagccaatttttctttttcttttttttttttttttttttttttgctctttgtcagacaaattccccccaactctttctgttcttggggaaattgcactcatggtattaagtacaccctgctgaaagcatgcaactcttcatgcacagctgtgtgaaagcatccttgaatccttgaggctgctagaggtgaaaggacctgtatggtgggtctgcctgcaatcctgggtttttttttctctctcttacaccctctgagtgactagcagttgaaagagagagtgcagatcctctgaaagttcatcccatctgtcctctatttttttctttcttcatatataagaaggtgccctgagaactgacagcttttttatagtattccttagagcatgagaccccagaaagtcaaatttgaaatccagatagtggcagaacttgacctagataaacttttttaagttttcaactaaactatgtttccaccaaactgttctttaaaacattccatttcagggcaagaaggggacattttaattcctctaaaatgctataaaaatctatcttgatctcttttaaatgctaattgctttgcattttttcacacattttctcatttacttctaaataattaaatatcagaaaatgtgctaggtacgaggaataaaaatagttgcatacactcttgcttcccactggaaacttgcaaatagcagaggggaaaatgtatataattcaaatgttaatgtagattaaaataagctgtctccacatgacagtctatggacatataaactggtatgaagattaagtaggaagttataaattgagcaaataaacaaacatgggagataatgcttttaagcacatatagaatacagtcatgaaaggccccagagtgggtgcagcagagaggaacatggtgggctccctgagtgctgggtatgaagttcaagagtagatcacctcacactgggatggttaatgttgcatgtcagcttggctccatcaataatcagctagaagacagttctcacatccttatctgtgagatgtttctagattagttaaaaccagaacatttgacttagtatttatgttcaaagtatttatgtatgcactcaattttaatacatatctctgtggtatgagtgtatacatatatgcttttcatattcaaattacagttgcatttatcaagagcactcaatctgataaacctgtaatggatcatgggttccaaaatatattttatttctttcaaattcactttgtattttctatattgtttttgtcatttctttccaacacatctgattatttaatttatgcttcatcatgataccttagaggatcatctacactaattagttccctcagttcagctagatagccaagttccttataaaatttatctgcctgggctagtgagctgactcagtgggaaaagccattggcctccaaacataatggcccagcatttgactccaggaatatacatggtggaagaagagaaattgatttcccaaacttgtcctctgacatactaacatgcaaatagtaaataaatagatgtgttttattttatttatatgtgtgtgtaagtgtctcaagacatgaatgatcatttcctataaaattcccagtgagtccatccttcacctttcatcatggtaaataattggagagcactcttttaaaagccatctggctacaacacataaaacagttttacatggacacgtttgcagagttattgcacagaagtctttcttattaggacggtatcttgaaaaatttctctttgtacatgagaatatttaaggcttccatgctatagcagaagtttgcctttaaaagaactccagtgcaatatctcatttgatttttctaaattcattctttgggtctgtaccagaaatacagttcttaaaatatcttaagagtgatcattaaagcagaaggttagaaaattttatatatatatatatatatatatatatatatatatatatacatgtacatgtacatatacatatacatatattcatatacacacacacaaacacacacacacacatacacacacatatatatatttttttctttgtatttctggaaaacattcaccagccaatctcaaagggaactggcatttgaagatagaataaagtccatttcttttatgtctagttgttcaaatgcattttgcttaataacccaattagacttgaaaatagtactgcagcaaatgtgtggttttaacttttgcacaataaaatcttgattagctagatcagaacccacaggaaatatcaattagccagaaggaaccaaattataaggcacctgagaagtatctggaatttagacagccatgctagacgttgctggagaaagtgtgtggaaagttataagcaagcatgtaatcaaatccaattgtcttttattgttttataatcattatttgagtatttaaatcttcagggatcattgaagcacattgtcttttgtgcactattcttctgacaaactagaaaactggaataaatttccagccactatcagtaacaaaagctggaagttgcttatggtccctcaggtaacccaaacccacaagaagctgctttccagctgacaaactacaagtccataaatagacagatgcttgtctcagtatagagctaacagtgatgatagttgtgaatacaacagaacagagtgagaggtattcaggaacgttcctccaactttggtgtagagacatcagagtggctcagtaggtagaagggcttgcaagcaagcctaaggaactgagtccgattcctagaatccaataatgatagaaagaaagaactgactcttaaaaggtgccctctgaactgagcttcaggcatactgtgacataagcctgcctccatttacacacacacttacacacacaccacacacacatacatgcacatgggctcttctgtcattcctgtggtacttcataaatagtgattttagtacgtcacacactgatttgtctttgagccacatccaggaagtcaacgtccaaactgctacatcagttataacctttgttgtccatctgagtcctccaaatggtcatcctcgccttgtaattatacagatactctactcctgatagagaatcagtcactacttgagatgaagcagactaatccttgatcttctaaagaatttccacgctctggccagtctatttcagtagctgtgtcccctttcaagctgcatgtgcatcactaaaaagccttttaaaattatcctccttttctcttctccttctcttctccttctcctcttctcttctcttctcttctnnnnnnnnnnnnnnnnnnnnnnnnnnnnnnnnnnnnnnnnnnnnnnnnnnnnnnnnnnnnnnnnnnnnnnnnnnnnnnnnnnnnnnnnnnnnnnnnnnnnnnnnnnnnnnnnnnnnnnnnnnnnnnnnnnnnncttcttcttcttcttcttcttcttcttcttcttcttcttcttcttcttctctctctctctctctctctctctctctctctctctctctctctctttccacaccatttccccaaaggtgcttttgtccttgtgcccatgttgtacctgtcgctgagtgagtcactgagaatatggatctctactgctcactgtacataattctagtccactgaagtagctttggtgaaactatttctgccaaaattatttgaaccattcagaccaggcaagagacagtactcctgtaatcagaatttactaattctacatagttatgcgttttagtaggagtttccatgcatggacataatgcattttggtcatgcttgccactgctattaccctgtcttattcctcctagtattcctgatcctcttgcctttcctgaaataattctagttattctacttttgtgacccacacacagtgtaaactctttccttttattgaaaaattagttagttcttctgtacaagaagagaggtagagttatttatagggcctaggactgtgactagtgggcaactctcatgtcagtggttagacagttaaagaaaatgtatgtttctccacctagcactctttacctagggcaggggtagagttatatgaaccattgtttgcttgcaacttttaactccctataaactctcaggtagaggtgatatctcctaagcctgttttctcagtcaaccctcaactgactgcgtataagccctcaggtgtggaggagtcctcatgtgcctcctttcccttcatgatgaattgttgagaggctcgggttgatgtaggtctcacgtgtttaatcccagctgttgagattctcatagtgcaatacctcatcatgcatggaggacatcatcccacaacactgtaccctttccttcagcatgaatatttttttctgtttgctctccatgatgtaagagactgccccttcaagaaaaatctaaaagttattataaatagaagagttgctagttaggctaaaataaagctacaggatagctagcaagttctcttatgtaattgcagagagttttcctctggattttattttttttttttttggtatgtttgttcttttttgtttttttgagacagggtttctctgtatagccctggctgtcctggaactcactgtgtagacctggctggcctcgaactcagaaatttgcctgcctctgcctcccgagtgctgggattaaaggcctgtgccaccacgcccggctcctctgtatttgaaatctaatggtttacataatgaagtactaggaacagatgatttgaattcattgcatcctatgttgatttcagaacataaaccacagatgctggcttgattcttcagtccagttttgtttagtccaaagtcattaaatcctctatgttattcacatcacgtctttaaaatatttttttttcaaaatgcacagcgaaaatgaaataaatgagacaaagtgtgttcaaacgtatgttaatagacatatgcttagaacaatattgagacacgaatctccagtgcaaattcatgaccccagaatatttccatttttgtaagtatctttttcatgtagaaagtgaccttcattctcagtttttgcatgaaattcacagtctccatctgcttaggcgttgacctattttctttgtcaagttttcagttgagatgagaatcaacttgaaagcatatttaaaggcatgtgggaaagcccaatatggggttgcagctggttcagactttctgttgaaattcttatggcctggtacaatttaaaatctatttatgtacttgtcatgaaaatgaaaaaaacaatcagagaaatctcatttgccagagtttaccacacacacacacacacacacacacacacacacatatatatatatatatatatatatatatatatataatcaaaagatacattgtcctgacattttgcttaaattatttaactttaaagtagtaaactagcccaatcacacttgtgtttgggttgacctttatagtgttggcaaaaaatagtgacttcaaaattacaacaaaaagtctcagctttcaacacttaaaagatgtaagatgctatataaaaacatattttcttttccccaagacttgaaattctgagaaatctgatcctctagacacatggaggtggggttttctcaaattacctccttagaatcaccaaatggggaacattcttctcttcaattcttaatatatttcttatattgtgtcttacttttaatattttaccagcttctgtagacttttcagattggaatagtgacttgaggtaatatggacctctcaaacaaaagatttagtgaaaattgtgcagtccagcattaatttctagattcaaagcaaagcattcatgagagtaagtccaagttacaaaataagtggactagagacttttgtcgatgggatataaacctccagaatggcctgatgctccaaacctataatcccagctattcgtgaagtaaacaactaaacgagtataaattaaagaccaaccagggctatagggcgagggtggggacaggctgaaggcttaaaaagcctgtctcaaaaaagggggattcaagctgaagtgatggcataacagttatgatatttgagtactgggtgctctatcagaggactaggttcagtctcaagactcataaggtggctcacaaccagctctaactatggtatagcgatccgcttctgatctctataggcagcaagcatggagtgtgcaggcaaactcatacaaataaaatattagacacttttctcaatgtagggactcatggggaagaaaaaagatttcagtgagatatagggtgaatgagaaagaaaaatagtgagtaaaactttaaatgagtcattacatgtatgtacaaaattgtaaaacaatttgagagggagataggtaggcaggtagaaagatagagaggtaaatacataaatagatgtgtagagggaattggctagggatatagcttaggcgttttatgcttgcctacttgtgcatggtaccatgttcagtcccatttcatgagcaaaaaaaaaaaatgggagcataggagaagatagctactattttatttagaaagatatctatagtaagtgtataggcatccaggacttttcattctgggacagagtgatagctgagctagaatcaataaatgtacctttttctcctttgctttctacctttgatggcataagtgtccaaatctattccaagcttagttgaaaggaatcactagccaataactctatcattttttatgtttgtgcctgtctaataaggaaagggagattccctatctatataaaaccctatctctgtgataccagttaaagcaaattgctgttctaggaggaatggtacactgatttatttaaaatgctcaaaattgatctcttttagatgctaatgtgagaattttgtttccccacctgagattaaattttctttctggggttttgcaatgctgagtatgtggcaaacatgtagaccgttgtgttggtgatagacaaactctcatttatgccgtctgtgtttataggcaatttcaaacactttcactataaatttgatcttgtcatttaggaaggctctttccaggacaacagttctctcactcacacagatttgtcaatgtgatcaatatattctgatagctaaggctgctgagctctgcattctctaggctgaatttgtttctgtgtttcaccttggactgttgtggactctgacatgttctgagcatgtgaaagaaacatcaggagatttttccaaagtagtacattttaggaaatgataaaatatgtgggaaacctacctttaaagtaacttcactgatttaaataatgttggacaatatctaaattaaatattcagcctagaatgatagtgccagttcataaaatccatgagtctgagtttctatggatgatgattaaacaattattaacagacatttaggaaggccagtatctctctatgactattgcctttaatattttccttctttgatttcagacaagaaggtattaaaatatagagtcaaacgttactttcattttaatttcatagattttgaagcatgaagtctgaaacgatgtctctctaagcatgatgactcagaagatagaaaaagaaggacttggatcaaatgttcatagagttgttgtagcctagacttgtagatgaatagacttaaagagaaattgccatgccaaaagaaattcagagaaattgaatgtgaacatttcaatgtacattactgcattattcatctgctatctagatattgcttttttatatatatatgcaagcctggtgtcatttgactttcaaagtatatcctgtagatatcttagctctggtatactgggcataaattatgaaattacaccaccccatttccgtgaaaccttatatccaaatgtagattgtatctttccgcctagatagccagcctgctcttatagataatatgaaaccaatgtaacttttatttgtaaatgggagtcatcataattttagaactaataagtatattaacttagcttgattagtttttttttctgatctgtcatttcactcatgttagtcttccttaaacaaacagaaaacctctttctcaatttgaaactagaatgaataaatctattaaattatcaaaaaaatattctgattcttgaaagtaatacatttccatgcatttttggtagataacaggatcttaagtgggacaggacattgaatatatcattaagttagaggtagtagttgtagaacttgtggtatatttcgttatacctgtgctatgactgtcctaacaaagaaaatattctgatttttaacatagtgatctatgtatacatgatttgtgttcatgaaagcattgggagaaaattgtacatcctcttctggaaccttgaggttttctgattgtgctttgcttttgtatatatttagtatcttattcaaaccttcaactcttctcaaacaaaccacaccattgaattgaggaatatttctttttttttctttttctttatttttccccccagagacagggtatctctgtgtaaccctggctgtcctggaactcactctgtagaccagattggcctcaaactcagaaccctgcctgcctctgcctcacaagtgctgagattgaaggcatgtgccatcattgccctgctttgaggaatgtttcaatggttattatcattcactcttctaccaatggaccagttctgagttaacagctcagggttcagctgccataaacttagtcatgctttgttacatgtaggaggtaccatactcaacaccagtttagcccattcatcacctcttctcactttctcacactcatacacatactgtaaaaataatcagagttagtaccaaattttttctataagtctgtccattgaataagtaatcctgtcttttcttaatgcaaatggttacaaaaaatagtcttgttccaaacctattatgtatctagaatttatatttgacaaaactcaagttgttcaaagtgattagaattttttaaattatattatgcaacaaaatggtcacaagtcaaaattcaccctcatacacatttactattagaaaatttagacacaaaaatcaggtttattctcttattcaattgcccttgtctcttactgacacagaaatttaatattttgaaaccaaaatgtccaagattaacatccttttgtatgtatctgaacactaatgttagtttagagatatcatcaatttgaatttaatggagatacatccatcaaatatgctcattccagacatagaattatttcatgtgttgggcagaataggctggtatatgctggcttcacaaaccaatctcatggtcccactagctgcacataacctcagacttcagagcttactgctatggccaagtgcttctggatactcccacaatacctcctttgtaaatagctatacacctttaacagtttattcttccttgcagtatttcagcttcctgaaatttgccctccatgtaacaaggtcaattgaggaggaaggacaggctactcagcagatactgtcatttgtctaaacttggtttagcttttctagaaccttacacagaccacttccaatgtccagacctagttttgtgttagactctctttcaaatacaatggtcaacaaaggtttcattgtctcctgcttttatagtcctagctttgatctatctatgggcatacacaggcatctaaagagaaaaataattttcttccatgggagtctgtagacactgcctgnnnnnnnnnnnnnnnnnnnnnnnnnnnnnnnnnnnnnnnnnnnnnnnnnnnnnnnnnnnnnnnnnnnnnnnnnnnnnnnnnnnnnnnnnnnnnnnnnnnnnnnnnnnnnnnnnnnnnnnnnnnnnnnnnnnnnnnnnnnnnnnnnnnnnnnnnnnnnnnnnnnnnnnnnnnnnnnnnnnnnnnnnnnnnnnnnnnnnnnnnnnnnnnnnnnnnnnnnnnnnnnnnnnnnnnnnnnnnnnnnnnnnnnnnnnnnnnnnnnnnnnnnnnnnnnnnnnnnnnnnnnnnnnnnnnnnnnnnnnnnnnnnnnnnnnnnnnnnnnnnnnnnnnnnnnnnnnnnnnnnnnnnnnnnnnnnnnnnnnnnnnnnnnnnnnnnnnnnnnnnnnnnnnnnnnnnnnnnnnnnnnnnnnnnnnnnnnnnnnnnnnnnnnnnnnnnnnnnnnnnnnnnnnnnnnnnnnnnnnnnnnnnnnnnnnnnnnnnnnnnnnnnnnnnnnnnnnnnnnnnnnnnnnnnnnnnnnnnnnnnnnnnnnnnnnnnnnnnnnnnnnnnnnnnnnnnnnnnnnnnnnnnnnnnnnnnnnnnnnnnnnnnnnnnnnnnnnnnnnnnnnnnnnnnnnnnnnnnnnnnnnnnnnnnnnnnnnnnnnnnnnnnnnnnnnnnnnnnnnnnnnnnnnnnnnnnnnnnnnnnnnnnnnnnnnnnnnnnnnnnnnnnnnnnnnnnnnnnnnnnnnnnnnnnnnnnnnnnnnnnnnnnnnnnnnnnnnnnnnnnnnnnnnnnnnnnnnnnnnnnnnnnnnnnnnnnnnnnnnnnnnnnnnnnnnnnnnnnnnnnnnnnnnnnnnnnnnnnnnnnnnnnnnnnnnnnnnnnnnnnnnnnnnnnnnnnnnnnnnnnnnnnnnnnnnnnnnnnnnnnnnnnnnnnnnnnnnnnnnnnnnnnnnnnnnnnnnnnnnnnnnnnnnnnnnnnnnnnnnnnnnnnnnnnnnnnnnnnnnnnnnnnnnnnnnnnnnnnnnnnnnnnnnnnnnnnnnnnnnnnnnnnnnnnnnnnnnnnnnnnnnnnnnnnnnnnnnnnnnnnnnnnnnnnnnnnnnnnnnnnnnnnnnnnnnnnnnnnnnnnnnnnnnnnnnnnnnnnnnnnnnnnnnnnnnnnnnnnnnnnnnnnnnnnnnnnnnnnnnnnnnnnnnnnnnnnnnnnnnnnnnnnnnnnnnnnnnnnnnnnnnnnnnnnnnnnnnnnnnnnnnnnnnnnnnnnnnnnnnnnnnnnnnnnnnnnnnnnnnnnnnnnnnnnnnnnnnnnnnnnnnnnnnnnnnnnnnnnnnnnnnnnnnnnnnnnnnnnnnnnnnnnnnnnnnnnnnnnnnnnnnnnnnnnnnnnnnnnnnnnnnnnnnnnnnnnnnnnnnnnnnnnnnnnnnnnnnnnnnnnnnnnnnnnnnnnnnnnnnnnnnnnnnnnnnnnnnnnnnnnnnnnnnnnnnnnnnnnnnnnnnnnnnnnnnnnnnnnnnnnnnnnnnnnnnnnnnnnnnnnnnnnnnnnnnnnnnnnnnnnnnnnnnnnnnnnnnnnnnnnnnnnnnnnnnnnnnnnnnnnnnnnnnnnnnnnnnnnnnnnnnnnnnnnnnnnnnnnnnnnnnnnnnnnnnnnnnnnnnnnnnnnnnnnnnnnnnnnnnnnnnnnnnnnnnnnnnnnnnnnnnnnnnnnnnnnnnnnnnnnnnnnnnnnnnnnnnnnnnnnnnnnnnnnnnnnnnnnnnnnnnnnnnnnnnnnnnnnnnnnnnnnnnnnnnnnnnnnnnnnnnnnnnnnnnnnnnnnnnnnnnnnnnnnnnnnnnnnnnnnnnnnnnnnnnnnnnnnnnnnnnnnnnnnnnnnnnnnnnnnnnnnnnnnnnnnnnnnnnnnnnnnnnnnnnnnnnnnnnnnnnnnnnnnnnnnnnnnnnnnnnnnnnnnnnnnnnnnnnnnnnnnnnnnnnnnnnnnnnnnnnnnnnnnnnnnnnnnnnnnnnnnnnnnnnnnnnnnnnnnnnnnnnnnnnnnnnnnnnnnnnnnnnnnnnnnnnnnnnnnnnnnnnnnnnnnnnnnnnnnnnnnnnnnnnnnnnnnnnnnnnnnnnnnnnnnnnnnnnnnnnnnnnnnnnnnnnnnnnnnnnnnnnnnnnnnnnnnnnnnnnnnnnnnnnnnnnnnnnnnnnnnnnnnnnnnnnnnnnnnnnnnnnnnnnnnnnnnnnnnnnnnnnnnnnnnnnnnnnnnnnnnnnnnnnnnnnnnnnnnnnnnnnnnnnnnnnnnnnnnnnnnnnnnnnnnnnnnnnnnnnnnnnnnnnnnnnnnnnnnnnnnnnnnnnnnnnnnnnnnnnnnnnnnnnnnnnnnnnnnnnnnnnnnnnnnnnnnnnnnnnnnnnnnnnnnnnnnnnnnnnnnnnnnnnnnnnnnnnnnnnnnnnnnnnnnnnnnnnnnnnnnnnnnnnnnnnnnnnnnnnnnnnnnnnnnnnnnnnnnnnnnnnnnnnnnnnnnnnnnnnnnnnnnnnnnnnnnnnnnnnnnnnnnnnnnnnnnnnnnnnnnnnnnnnnnnnnnnnnnnnnnnnnnnnnnnnnnnnnnnnnnnnnnnnnnnnnnnnnnnnnnnnnnnnnnnnnnnnnnnnnnnnnnnnnnnnnnnnnnnnnnnnnnnnnnnnnnnnnnnnnnnnnnnnnnnnnnnnnnnnnnnnnnnnnnnnnnnnnnnnnnnnnnnnnnnnnnnnnnnnnnnnnnnnnnnnnnnnnnnnnnnnnnnnnnnnnnnnnnnnnnnnnnnnnnnnnnnnnnnnnnnnnnnnnnnnnnnnnnnnnnnnnnnnnnnnnnnnnnnnnnnnnnnnnnnnnnnnnnnnnnnnnnnnnnnnnnnnnnnnnnnnnnnnnnnnnnnnnnnnnnnnnnnnnnnnnnnnnnnnnnnnnnnnnnnnnnnnnnnnnnnnnnnnnnnnnnnnnnnnnnnnnnnnnnnnnnnnnnnnnnnnnnnnnnnnnnnnnnnnnnnnnnnnnnnnnnnnnnnnnctttaaaaacctcctctgtcagctggtgagatctcaaaggggctatatgcttgacacaagtgtgaggacttgagcttggaaccagaattcacattaaggtggatgtggttgctagcaactgcaatcctagtgccccctagaggtgtttggaagaagacacaagtgaaacctgggaatcattaaaccaaccaaccaaagggactctgtggagccacacccaaggtggtttgacttgcacacacacaggatggtagatcaatcggtgcacacacacacacacacacacacacacacacacacacacacactgacactggagaatagacttatttccttcactcaaaatatcttttgtatgatataatatgcaattgggacattaatagattagaagatttatgaaagtgcaccaggactgtgtgcactgacagcttgcccaagaacttgcttttcctcctctgatgcatccctctgccacactgggtaccattatctactttaatcataatgaatcatggggcaagctatagttgtgaatggcaggcacttacttatgcaaatgaatcaccacattgagctagcttagttgatcaagcttttcaggtcaagtaggactttctcccagatcagataaatctctagagagatacagaggaaatctgtaggttctgtcattctatctgaacttccacattgtgcttttattcttttttcccccttcaaataatgatcagctggactaaggaagtacttaggactccattagtttcctgttttcataaaataatatgagagtcgagattagtataaacgcaaattgttttgtaaaatatggtatgactctgtgaaagaaattcgtttaatgtgagcaaattgtttctgaagtgttccttcctcttaacattcctgtaaatttggggtactgtgaaaatagtaattagtgacagatttctagcactgtgacaatgactttcatagcctgggatcatgaatcagctaatgggggcgattcctgtttgttctacaatttcatttctgttttacaaacttgagtgagagactgcttccttgctacattagccttcagcttctactaataattgaaatgattattttgtgacttacaatcttattgtatagctgaacaaaaataactgtacatgtactttctaacagtgaggcagttgggggaagactgctgttaacttcatagctacagtgctctgtcagcttcctgaaatttgccctccatgtaacaaggtcaattgaggaggaaggacaggctactcagcagatactgtcatttgtctaaacttggtttagcttttctagaaccttacacagaccacttccaatgtgccagacctagttttgtgttagactctctttcaaatacaatggtcaacaaaggtttcattgtctcctgcttttatagtcctagctttgatctatctatgggcatacacaggcatctaaagagaaaaataattttcttccatgggagtctgtagacactgcctgctttctttttttttttttccatttttattaggtatttagctcatttacatttccaatgnnnnnnnnnnnnnnnnnnnnttatattatgcaacaaaatggtcacaagtcaaaattcaccctcatacacatttactattagaaaatttagacacaaaaatcaggtttattctcttattcaattgcccttgtctcttactgacacagaaatttaatattttgaaaccaaaatgtccaagattaacatccttttgtatgtatctgaacactaatgttagtttagagatatcatcaatttgaatttaatggagatacatccatcaaatatgctcattccagacatagaattatttcatgtgttgggcagaataggctggtatatgctggcttcacaaaccaatctcatggtcccactagctgcacataacctcagacttcagagcttactgctatggccaagtgcttctggatactcccacaatacctcctttgtaaatagctatacacctttaacagtttattcttccttgcagtatgactaatataccatgtgctcttctacagcttccttatatttttaaattttcatataatattttcaatggcaactatcaaaacagaatcgttttcaccaaattattttaaagttactccctgaattttccaattgtctctgtaaactaaccagttttccctacaaagtatccatatcaaccagtgtgactactttcatatacttgcatttgtgaacatttatatgagctggtggacactgaacccagggcattcattgtgcatattataaaaacctgctatactagtgagcagtgaattaaactcaagacttaacagatgaatcttctaatgtttcaccagaaacctcttttactgcagaggcagatctgactccttgcctacaaggaagattggcagaatatgcctactgtctagattttcacaccttttttaagagagtcgaagtgggtgtatctgacactagctgttccttcctctcctagagttgaaatctgatgttccaagtggatattaatgtgggaatttgttctcaatctaagaaatgagctttaatagaacatctagaagatattattttctgctttataaattgttcccttggatggtagaaagctttaggggtcattttcctattctttaaaaatctaggagctggggcctgaaattgtaatggccaaaaacattagtggaaagaaaaatatgcaattgtattgatggtaagtttttaatatttttaatctctctatataaatgtgtgttggttcatgtgtatgaatgtcagggtgtgccacagtgcacatatggatgtcaggagacagtttatggtgctgtttctcattagtccccttagttggggcagggtctatatttgctggatggcctataagcttctagtgcttttcctgttactgactcccatctcacctataccaatgcataacaccacatatacatatacacatatgtacctaggcagcttttctccaagcagagtatcaactagtgacttcaagataacattgggggctttgacaaaacatcatccaaattctttatactcttaatataaaaataaaaagatagaaaataaaagaaaccttgggaatagaaatctcaatacactaatgagcatgctttttctagaaagctgtatggatgccaggaccctaatcatgtgctcaaaacaacaacaacaacaacaacaaacaaacaaacaaacaaacaagcaaacaaaaccatgctggttgaacatgcttgcttgcagcagatcctgaagttatggcactcatttcataaggatatgtgctgttagcccatgttcctatatgttttaatccctagaaaaacatcttattaactcatcaatccttgtaagagaattctgcataaatacattcacctagtaaataagttgagctaccatggagacattgaatgttctttcctttaagtgcaatttagagacttccagtgttgaggaggacaaaagagacacactttattttccattttatgtactatgtaaggttacagaatataaccttatgtagattagtgatatgagcacttttatgctattttcaagtgagaataacaagatattatgtcacttggccaaggtcacaggatagttctaacaattgtcaccattcctattaaatgaaggcaatgatcattcattttggtaaatataaaatgaaataaaattaaatgtgttttttcagcagcaatttaaaagtagttggaggagtgcacaataaatagtttatattccattaaaattaaaatgtactagatatgaagtaccagtgggtatttagaaagatagatggagaactagataaacacatagagaatcagaaaaatatgatgaaataatgtaagttattaattccaattaatatacatgcacacatacatatatgatgaaatattgtaagcattattaattcccattaatatgcatgcacacaaacaaatatatggtccaattgtatagccctatctgtcctggaactccttgtaacagaacagcgtgtctctgaactcacagagctcttcctgctgctgcatcctgagtgcagggcttaaaggtatgaaccatcacagctggcccatttttattgttgttgttaatttgaagtttacaatgttgctactaagacataaggcattatattagttttgaagctttccagaaatacagtgagaaatttagctagaagtttcataccctaatgctttcctttgggtgtatgtggtagtatgaacatgggagtggagcagatatgtgtgtgtgtgtgtgtgtgtgtgtgtgtgtgtgtgtgtgtatgacagtctaggtcagacaacagtcttggtgttcttttttcataattatgtgaaattagcatatgctgataaaacataagtaaataactagaatgaaggaaatgttttattgtaattatgtctgactacaggtctaatagccatatacatttatgtccagcaacccttgaggaatttccattgtgagaaaaatctttcccacttcttgcctaagagcttccatctgatacacaaagccctgtgagcagttggttcagaggatcagccaacaaaccttggtcaccttgctcccaaaacaagtccttatggctgagttttgagtctaaaattccctttcattgtatgtgtgtgtgtgtgtgtgtgtgtgtataaggagaatgtgcatgtgagatttagattaggaggattgataagattggaatgtattccaagcatcattgtcacatgatgatagaaatattcagcaaagaaaagtacctgtcaggagcttccaaatactgtgattataagagaacagtcaagggtttgatacaacaaaccgaaattctaacttcaataatgctcattcgaaaagctaccaaagttagggattttgaatgggtgaactgaaaaatactgatctaccccagtatgttacatagaataagcaaaattgtgtttcctgtacaatgcaatatttgacactttaaacatattttgttatatattcagtactttaaaaacnnnnnnnnnnnnnnnnnnnnccccctttttggccctggcgttccccctgtactggggcatataaagtttgcgtgtccaatgcgcctctctttccagtgatggccaactaggccatcttttgatacatatgcagctagagtcaagagctccggggtactggttagttcataatgttgttccacctatagggttgcagatccctttaggtccttgggtactttctctagctcctccattgggagccctgtgatccatccattagctgactgtgagcatccacttctgtgtttgctaggccccggcatagtctcacaagagacagctacatctgggtcctttcgataaaatcttgctagtatatgcaatggtgtcagcatttggatgctgattatggggtggatccctggatatggcagtctctacatggtccatcctttcatctcagctccaaactttgtctttgtaactccttccatgggtgttttgttcccaattctaaggaggggcatagtgtccacatttcagtcttcattcttcttgagtttcatgtgtttagcaaattgtatcttaggagggcatcatcctgagtgaggtaacacattcacaaaggaactcacacaatatgtactcactgataagtggatattagccccaaacctaggatacccaagatataagacactgcctgctttcaactccattccttaggttttaggtgactcctcaaagaatccacagccacatggaactctattattttcctgtttccatatatatgtatatatatcatatatttgtgtgcatgtgtacacatatatgtgcgcacacatatacattataagaagtgtatttagcctttaaaggctgatgtgaatatctacagcagaattctcacatatgtagcccccagtgttgttctgtcttagatcatgaataccaaacttcactgcagatcctttggatcccaacatgatgaattacagtagagagttatgcccagtgatatgcatacattttaaagagagagcaaggaagaaacatgtgttttaatgtttttaataaatgcatcttctatactagacaactcttctcttctgatgtatgccttaacaaacttctaggttttctctctctctctctctctctctctctctctctctctctctctctctctccctccctccctccctccctccttctctctacttctctctcctccctctctttctccctctctttctctctcctgatctcttttactttctcctctcctttctcttctttctctcctttccttcaatagcctgatccttccccttcctccctcctactctacccctccccctcactcaatctctctcccctttgtggcactggtcttgatctgtcacagatacatgggcagcctgagtccacagagataactcctctgttcttacctcattcccaaataaaacagaaacaaactcggagagctaatgcaggaatgtctctggagtatggaggatgcagaagtttcactatttttgctaatagtgtcctaacaggaaccctgtggaaatgagcccattgcctacaaagctgacagatgtgcctgctgaaattctaagtactgaaaatctaacccattgtcaagttacttcatccaaaccagcctgctattcaagaattattttcagaaaattaaaacaattttaggagcaaattacttggaaaatatataccattaatttcttttgaggaaacatttgtttcacatttattttgtgtatgggagggcatgcacatggattaagcagcatgtttcatatgtcagaataattgtcaggagtctgttctttccttccaaccacacagattgaactcaagttgtcagtcttgacattaagtatctttatatactgagtcacctcactggtcctaaaattaactgctcagtttcagcattcaggataagagacacattttattgtaaaatttaaatatatatttatttgtctgaacacaggctcagccttgaatctatggtgccccagcccagttttcttagtgatgtgattccaagtatacaataccattcttaatgatgtataagtatttaagagaaatatagatacatctatttagacaatgagtgaatgctttcaagctcaccaaaacgttctcatttaattacttggtgactcactctgcttagttaggatttattgtattgccatgagtatgttattatttccatgatcaagggtaatttatcactggcagtattgctgcggatatgagtccattgtacaccttacctgactctagtttctcagtgatggggcaggccttctgagcttctttcacttattttgaaatgctaatgacttccttctgtgcttgtgttgtgcgggtaacaagctctgcagttagtttgagtgttcaacagttaagcgatgctcagaagattgtcttacagccctttacccactcttctggctcttgggttttttgtgttcccttttctgagatgttctatgaactgtggagtcattgtgataaatgtgcaagttcgggctgagcactcaacagtaactacttctcatcacattgaccatgtttttctgcagtaactgtcagccactgccaaagaagcctctctgaccaagtctgagagcaccagtcacctatgacaacgaacgcaactattttgaaggcagcttgacaggagttcatgctccaaaatagtagtggtttccccacaacctgcccagtcatgagaccttgaccaatgttccaaggctaggtgtgaattctctcctatatagaagaaattaaatatcatcagaaagtgatgtaaatcctcctcatgaacaagaagtgttttagataagatgaaatcctcatgaaaagtctttacacccccactcctttgtcctgtggtgatttctttatggagggagagaatatatgacaaaatagtttacatttttggaatgtaatctggaaaacagtatttatatgtagatgtgtaaacagtttttatattcagacatttgtgtatttggaattagtcaccgtcaagcttctctaaagcaaacacagaaaatgtctgctgagtccttgtaaactgcttttctcggttttcctaaactgacccatacctttaagttcctcattagatgcatctcatgtttcctcccttttcctaaaagttaacagctgttagtcaaaaacataattgctgtaggcttttccagttccgtgaatttttccactgaatcccatatggtagaaagcagctgtcattttatccacctgtatctatgctttaattgactcaactcttttaaatgtgtttgtgtgagtacccatgcatgcatcaacacatatctctatgtccctattcttatacctgtacatctatattaacagcgagaatggtcaaagtgcatctgtcaagagccatcctcccttttctcgtgcttgaggcaggatctcttgttatggtaccatgacttcagttcatctggtttgtgagtttctggtctattctactgcctctgccttccatatgaccaccatggaatggcagggaatatagatgtgtaccaccacatggagttctttatgtgctttttgggaatcaaactcaggtacctaagcttgtatgtaaagagctttttactcactatgccattttactgtttcagaaattgatattttaaggccaatttattttcaactgtttcttcagttgggctgtgtaatactttcttatgatgaggtacagcctacagaattttggcaacaataatattcaggctcttcacagtataaaacatcagaagtcatgtgtgtgtgtgtgtgtgtgtgtgtgtgtttatgtctctatatctgcatctataccctgatttagaactacgtaattttgactggcctgaaactcacagggctatctgcctgcctttgtttcccacatgttagcattaatggaacacaccatgatgtttgattccatgtttttctttaatactggtaaacactgataatttgacgaaatagttgcacaggatactctgaaacacagaaggcttggcttctcttttgatttgttttagcagttaacataaactgagtttgaggaaactctatctttaccctcttttgcctcatcctcccccagtcttgtgaggattcatctgtttcaatatctttgtatgtagtattctaaattctaaataataggcttctgaaaaaaaataatacaggtgtcaggagtctatcaacatatgatagaaatagataatgtggtatgttgcagtaaatagagatttattctaataccatggatgaatcacattatctgtagggaaatatatacaattagagattaagattaagcaaaagagccagaaatggtatgcatcatttttatacttactgtaataaaatagcagacagatacaactttaggatgggcaggttgttttgcctcactgtttgagggtgtgatctgtccagtcaaggaagtcatgtcagcagcagcataaggtagctggtcccatttcatctacagtcgggaagcagagacggatgaaggctgatgctcagctcactctctgttttctattcagtcgaggattataaccttacaggatagtgtcagccacattttcagtgtcttccctcccagctaaccaagtcgaggaaccctgtcacagacatggcaggacattcactctagatcctgctaaggttacagatcacaaaaaccatcagtctgtttatgtgtctgtgtgcttttgtatcagactctctacctactttatctatctatctatctatctatctatctgtctgtctgtctgtctgtctgtctgcatttatatgcaaataagctcaaatcctacaatgatgagtctgagagagttgcttctatactctttttcctgtcagtttcttggtttctgtgaaacaaatctgtgtgttcattttttattccaagctcagctgacattcaagactcctgttttgttctcttctctctgtctctctgtctccctctgtctttttgtctctctctgtctctctcctctctctgcttctgttggtctctgtctctgtatgcttctgtatctctctgtctctctgtctctctgtctctctctgtctctctgtctctgtctctgtctctgtctctgtctctctctctctctctctctctctctctctctctgtgtgtgtgtgtgtgtgcatgtactgcttatttaaattgtctctatctcgtctgctctcatgtgagttgagtgtatcctatcgctgacacattctattgaatctttctctgatttgtattttgtctgcctctcaattaggctttacatttaaacatggctaattacttatacaaaactattttaccttaagggtgtgtattaaggatatgtctaattccagccaggtggattaaagttgtgtggtgtgttttcatttcagctggatcacacagatctttgtatatgatccctgccagagtagccttgttgctggattaaaagtcctctaaacacttttcccctccttaggcctgaacacctttgtgtggtcacctgagggatgtttctaatttcgttttgtgatccataccttacctatctctactgatcatttgttagatatcagaagtgtcccagttttcaaaccttcccctttttattaaattccctatattttgcaacaatcccaggtaataagcacatttcctttaaataaaagggaaaaaggaaaaaaaaaggaagaatagtagttgtgagagatagtgcaattgagttcttgccttgcaaacatgaagacctaagttagattcttaaacactctagaagctagacatagtagtgtacatttataaactgggtgatagggtggtggaggaaagaggaatcccagaactcactagacagatagcctagcccaacaggtaagtgcctgtttcaaagatagggtggtcagcacctgaaaaatgataatgagggttgatctctgatctctgatctctgtacacacatctttcacacacacacacacacacacacacacacacacacacacacacacacctacagacacacatccagacttgtaaattcagtctgagggaactaaaataactgagtacagagacaagttgcaagctcagcaggtttcagcaggttgtttttatagtgatgattagaactagtgacttatattatattttatttacttaacaaatatgaatgaatacatgattattttctaagcttgaaaaaaaccaaaagcttgttacttaatataatatgtaaagagttagctgaaagggtaatgatgggacatagttcatatgtaaaatgattacagttctatagtattaacattgatttcaaaaattaattgataattaatttgatacatcattgactaattatgcctggtagaggaaaaatgagtaaaaagagaagacattaaagtataatgcattagtttattaaagtacacttaaatcatatctatgtggttaagagatatttggggcatatttggtggaagaattatatgaggaaatggaaaattatcattgaggcgtgcacttttatctaatggatttatctagtttgagccactgcttgtatgaaccgagatccatgcttataagcctcatacctgcccaggctggaaggcattgggaagccagctcagcagtgaggagagcctaagaagtgaccttattctaagaaattacattttgcttcgaaacccctttacattttaaaattagagtaaaaaataatggggttcatgtgacattttgatgcatatattttttgtaatttgttcacgtttgtgtaaattacttttacatgagctaaagctaatatgaaaagacattgattacataatgtccatcctctgttgggatttccgactgggttagctggtttccttgttttccttagctactctttcatttctgtgatgaatcaccacaaccaagataacttataaaagtcaatatttgattggggtcttccttacattttcattgggttagtcaatggctatcatagctaagaacatgacagaaggcaggtatggtgctgattcagtagctgagagtctacaagcggcaggcagtgggcaggaggtgggaatagggagctggacttggttgttggcttttgaaaccttagaacccacttctagtaacatacatcctctaaaaaggacacatctttaaatcctttccaaataacacaatcaagtcaggaccaaacattcaaactatcattcattagtggccatcctcattcaaacctccacatcactgctttgataaaatatttgacagaagcaacttaaggaagtgtttatctattcaattgttctaggacacaatacaccacagttgggaagacatatatgttggtaccctgttttatttactattgtaataagaaagtatataacttatttttatattttcaggaacacaccactgagagattttgaaattttaaagagatttcagagattggacaagactgtagtttcagagatattttgggtattttagggatattcagtattttagagagacttgaacttggaataagactgcatatttaaagagaccgaacttctaaaagtgtttagatttttaaatgctgtatgattctaagggttagaatactttatcttgtgatagtgttacaatataagatcctgagtatggacaatagaagaaagattatggtttcaaaaaggttttgtgtgtcaatttgtaaaggattagtgatgttgctgaattttatatcagcttgacacaagattgagtctttggggaatattggaatctcatttgattaaatgtcactagcatattgtcctatgggcaaggctgtggtgcattttattaattaacgattgatatgggaggacccagaagattgttggaggtatcactacaggacaaaggtactgggtacaaaagaaaacaggttaagcgagcctttgggaacaatccaataagcatcgctctgccatcattatacttgagtgtgtgccctcaagattttcgctttgtttgagttcctgccccacgtttcttagatgatagacaaaggtatatataagataaaatatactccttttgttccaggttgcttttggccatggttatttttctgagctatggaaactacataactatagtagctaaaatatcatggtaacaagtatgaaggagctgataatactatattagtagtcaggaagcaaagacaaatggaaaggagctgataatactgtatcagtagtcaggaagcaaagacaaatgggaaactgaaaataatcccatgaaatcacctaattgaggctaaaggaaaaacaacaacaacaaaaaaccctcaagtttgcatttacctaaacttgccctagcttgcaagggcattcctgggaatatgtgatgtttccccatgggagactttgtccgtatatttaatcatgggagaaatatatgattggtacttctcattaaatattttggtgtcataaataaaatttgtacccaaaagtctcctctgtgcccacatgctgtcataaaatccagatagaatatatcaaaagaatttcctcttagagaaagcaatgtttctccatgtacaaaacctatgagctattatggaaattccactctcttaattctactactagtagtagggacagagcctgggcccagacaagttttgctaatcatcttcaacatgccaatcaaaggcataaacacaatactgaaaaacattaaaaaaaggagattattcagtgttgccacattgaacagatagataaaaaagaagatgctcagtgacatttttataacagtctttagagatctgacacaggtttatgtttacaatgagggcaaaggctatacataaccatggagtccagtaaaggtgtggtatagccattcattatggccacagtctcttctccagtatttcctgcaaggttatctcagaagttttgagtctttttacaagaaatgaatttcctgaaaggactcaaactttttcttttctcattatgaaatttctcacaaaactttaatttcttatgagtccttgtctcactctgatagtcaaagtgaggggtgcaagagtctccttaggatctcctcattcctgccaagatagttatgaaatgtgacagacggttaacagtgcataaagacaaaattagaaaatagtgcatgtgagtcatgtttggataaaagcataaatatagacatgattattttatttaagtatgaaattaggaattgagagaatgattctgcactgcagaagctctaaaagataagatcaaacaaatacaatgaaaaataaccatgaaaaatgctgctactgtgccaaagtctgggctaccctcctgatctgtgtgtttaggatagggggtatgtatgtatgatgtgcatgtacacatgcatatggaacatagagggcaaccccagattatcttcctaatctatactccccctttttattataggcagtgtaaaagcgtgggccttctacacccttccttgtttccaaatagtgacattaaaacgtttatacctattaataagcttcttgcactataagtaggcagacactgaactattctaacccggactatgatgaccttagactctttctcagcctaattcccagccacaaggaccattacctgccatcctggctttctgcttcacatttgtctccatggtgactccttcccagagttcctttttctctcccctgatgtcccatcttactattctgctataggtcatatacttcttaaccaatcagaaggtgatggaaatcactgtttacaaaatattaaggcagggaatgttcaacagttccaaatatccagcctgtaattagatcactgccaattcagaactcagtgtctgaataatacaagagtaatctttacatagtgaacaaaaacattactccaagatactaacctggtgctttccagttttgctagactacctggccagcaagctacaggaatctcttgtttctgcattcctagaactgggattactttcagcatttgtacatgatttctgggaatcaaaaccaggtctaatggttgcagagtaaacgcttgactgacaagccaagccccccaccacagaccagggatcattctttgcagaaatcggatcagtgttaatgcattagctcccaagacactgcaaaggagggagccaatgtatgtaagcagcaccgtagctccatgtgtcgagcttcagagaccattgcttgccctgggcaccttcacacctactaaatgtttgaagaagccagaagcagttcctgtgttgcaaatgctctgcctatcactgttttctagatttttggaagcccagtaatgagatccatggagatcctgggcaatcttggtatccagtcactctgtggctcctgccaccaccgttaatctaatatacagtatctagaaacccagaagaaatagcactgttctccacaggggcactgacactgtgtcctccgctctggttttcacaagaatgctgcctaagatacttatactttaaaagaatttgcagattattgtacacttttgttgctattaaaagtatacattcacatgaataacattaaaatggataactttacaattttttatttattctttgactatttcacacatggaaacaaagtatcttgatgatagccactcttctctcttggtcttcagctccctctgattgcccccaacacatcttcctcccatcttcctgccctttcttctttgtacaataatccattgagtccaattagtactatctatatagtgtagggccatccattaaattgtggtcaatgtccctcaaaaaattagctctctctccacaagcagacataagtgcagatgtctcctcacctacaagatgaatctgtgaacaacttaccgtaatgcagagaatgatgcttttgtttttgaataaaacaaaacaaaacaaaacaaaatttcttgataacttttaaactctcagagaatgtttagaaattatttttatatatttcctcaaaaaacttatgtgaagtattaggtgtatatgtatatatttgactgtctgtttatgagtgtgtgtgtgtgtgtgtgtgagagagagagagagagagagagagttcacatgtatgtgcacgtgtattttataactgaaactttatattcacaaaggcattgtaaattaaaccattttcacctttaaaaactaactttctaaagatcatttttccatcagaatcacatccctcaagttcagtacagactattttccaagctattgtctgaacaaagcaatcttgtctaattgcagtattatatatcgtgctctttaaaggtttgttgtatttacagatcagagcatgcaacatcacacctgggttgctatagagatatctaaattttatcaaaacaaacaaaaaacccacgtttaacaatacttgaatctgtaatacatctgttaaaaaacttaatataacttaaacacccaccttagttttgcataaataccataggaaaaagtaccagtgcaagaagacatcatgtgcttttgaattaggtacgtttctaagtctcataacttttattctgaggcatccactttagtgactcatttccttgaattaaggctagagagagaagctatttctttaaaagttttcaaatttgacttgtcaaattatagagtgatgcctacgcccatctttagtagtttaacatgaggcttggtttgattagacgacaggagatgtgcctaggtaagcagttctggtcaaggtgtgatcccacccatttttgacagtcaatttctagactcccttctcctctgcaaggtggttttggatgttggaagaactgtgttcctttgggtggtactaagtttcagcctttccgtccccactttgagatttctagggacattctgcattcattgtggtccattcagcctttatctttctagcttaagatttccaaggaaattcttgctccctatgttccattgtttcaagagtctgagagttaagggaagggaagatatgtctctttagtatctttttccttgtatcaacagttgcaggtttgtttgcttctattcaaacccccatgggctcctgattttaatgatttgcacacttagcatagtggtacaccttttagaacacactgagacaagatacgcagctaaagctcactgcacaaaggagaatcagagatcagatcctcagaacgcatatataagtacctcacagaagtaccatccttttgtaattccagactcctcctaagaagacaagagatcttcagagcaagctagctaataaaagtaaccacaggtgcaagttctagattcaagtgaaagatatcacctcaacaatagtcagtagacagggacccaggaagaatctcaatatcaacttgacaccaccacaggcatccattcacataggaatgtgcatacacacatgcatgcaaacacacacacacacacacacacacacacacaaggaaaaaagaaataaaacaataaaaattatagcacataatttgcacctacctactctattttctctcagctcccatgtttttatttggcatgtatgtcttctaaataagatgtgttttgtgatggaagctcttttgcagatttgttgctctccccatgctccaacacactgtttttttcctttggcttcagctttagatccttcacagactaagacaccctcaccattattatcttctagagtatcttcaactgaattcccagctcataattaaatgttcatttttctcacaaagaatgttttaatttcgtttttaagttgttcctaccatatgttgtaagcaaattctttcccttgatccagctctttccagatccagtcttcctacccactccactttatgttctttctctcttaaagaaaagaaaaccaaaaccactaacaaactatatagcaaacaagcacacagatacacacacacacacacacacacacacacacacactcactcactcacacgacacagcagaataaaacaaaaaaaaaagaaaagtgaagcatgagtttcttttgtgtggccaactgtttttgagtatgcctcttgtcttctgatatggttaatatacccagggacactccactgaagaaaattgatttgttttccctctctcagcaggtattaattgcaaaaagattcttgattgtaggtaggagtttgttcccactgtcatgtagccctgctgaattttctttggtttgggcttatatagtacttataggtactatgtgtctctgtgagttcactcttttaattgtatcattcttgttgtatctggaaaaaagtattcccttgcaatcatatacctcctctccctcttactatctttctgactcctcctctagacagatctttgagttttgaaaagagcagtgtggtacagacatcccattgaaatatgagttcttcaaagtcctcactctgtgtgttatccagtcttgggtctcttggttaattatcttctactacaagaagtttctctgatgatgagtgagtgaagtatatacctatggatattatgattatatatcattaggaatcattttattgctattttcctcagcatactactactactactactactaataataataataatttctctcatagggaccttaactaatggtataaaatatgggttccatctgatggagcaggtctcaaatacaatcaaaaagtgtttgggtactctaataccatttatgtaactcttgctgctgggggtatattttacaggaagatcactattgtagctcaccaggtttgtaaattgttgaccacttttctagaagtgtctatactactttccagcaaggtgaacggtacccagaatgttgaagcttctatttgagcaccatcctatttctgaatgttggtgacatagtctgttgtgtcttcatgaaaactttcctaaacgtgcttatttaactttattcttgcttgcacaatctgtgtttctgtaagttagagcatatggttatctgctaaacaaatggctcaattgtctaattaggtaagtagctcattgaaaatggggactatcttagatttttcacaaaaactgaaaatgcttgggatatgtcattaactagtaactatgtgtctagtgaatgcacattagagagtgcagtcgtttaggttctaatgccttccagaagtatccagcagtgtcatctttgcctcatttttctctgtagcaagactgaccttggaaatttgtctacctgatatgccaaaattcatttgtggctatcactgtgcccatgaggttggaagagaagaagctgagaacagtttctagtggagcctatgtatagtatagtgagttgacctcttgtgtggtttccctgagaggtgatgctactaaaatcatcttaaacctctatttattcaaatttaatcatcatttgtttatgtattactttaatttttcaagacaatgtcttatataattcaagctggcttctgatttcctgtgtaagtatgacatttaactacttaccttcctacatctcccatctcagagctggaattgcagatatgtaccacagccccttggttttgcaaggtagaggatctaattcatgtgtatcatgtcaatctgtctgctgtaagtatttacttagccccatgcatgtttattttaaaatttctccaaatttaccttcaaaaattggccataaatttaggaaaaaaaaacttcatattttgctccttatcttttctcctgtgtaagaagagcatgaggactgtgagttttgataccaagaattggggatggcacagagaaattcaggcaagtgccatctcttccatcaaactgtacatagatagaaaaacaataacaaacaaacaaaaagtttcctacattttcttcagtggttgcaggcatttgtacttctatgaagaactacttacccatggtcatgtacataatgcttatgaagctcctagctatggacacacacacacacacacacacacacacacacacaccatgaaaataaaagatacactgactgaggaaggaaggtaggaaggaaggaaggaagaagcatagcaagaggagaaagaagatgagagaaatgaatggggtgaatataataaaaatatttccatttatttattgattgatttatttttatttttgttttagttttagatggtaattcatatattttgagaccaaatctcatgtgctccagaacttgctatgtagctgaggatggcactgaacttctgaaccttctgccaccaccttctgatggtgcaacataaagatgcatgaaaatgttttaaaccagtctcctattcgagataattaatgtatgccaatgaagtaaataataaattatactaaccgctaagaaaaactttgctcatactctttttatttaattttgatttattagatggaattcagctttaaactttgttatagaaaaatgaaggctcccggctgctttagaatttaaacttgaaaagggtttcacatgtgtagagctggcctcctctagaggcacttcctgtcaccatcattaatatcaagtggaagagcccagggctcctttgcatttataaactttattcctaatggatcaaacatgtttttttgtttgtacacatggtctccctctgagcatgctacttccttataaaatctcagcttgctgacttaattcaatttgtgctcagcatggccttcatgaccatctcagaactcactaacatatttgttcctccaagatagatggaaatggtgggtagggtgatccccaaaataatcacatcataaaccctagaactagggaatatgatctatggtaaagtgaattaaaactgattaccagttggttcttaaaccacaagagtactgcaatgtaatgaatgaaaaggagtgtgtggcttttcacaaaggagtgtgaacaaattccttgttaagctcaaactggattccagtgacaggctgaagaaaattaaacacaaagacagcttggcaaaccagtaagtttttcatggttcctttacaggagcatgggttccttaaaggctgctgcattaatagaaagcgcatccaagcctgggtgataacttacaagaactgtatcccagttaaaaacaaaacaaacaaacaaacaaacaaaaagagctgtatcccttgcacaacttacaggcaggtccactgaagatagatacctcttcctgaatctttatgccttgtgaaactttgaggatagggaattgggaacttggggacttgacaattttgtactttctaattaatcttccagagccctttggggctattctcccacctctgtgagagcatgtctcaatttaaagcaaaaagatatctgcaaaagggagaaagagaaaaagtcaaagaggtgggataaacgtacagaaagctcgtcatgaaccagtcagtgcaatcggtttctataagatacaatgggagatgccttcagcttacactgctccaggcaggaaaggagatattctaaatggctagttatctctctctttggctatcacattaccgagacagaagacatcccccaacttgattttctccccaaatctcatactgggagatggaaaaatacatgtccataatgttaaccaggaagggagcttgtctcttgaaaggagagactgtaggatagagtgaagcagagataataatgataggtaagatggcaccttaaccagatcttactatgctgccttctagttaaactgaaaccttccccacccaccccccagccactgaggagggtagggcagctagtcactggaattctttgctctacttctcaggatggccatattgaataaatctccctataccactttccccttttattgtctcctcaattgcaattttggggaagggtgtctggtccctgtagctttcagagcccagggtctcacaactgcactagcaagctaatagttagcaaatacagagcactttagtactgaaacaataaagaactgagcgctgcccatgagatagaatgaccctactggggaaactgggcttctctcttagaggtcttattgataaaagaatttaagaacaagttcagaaggaagctcaaggaaatgttattttgtccattaaaaggaaagctctggggcaataagctttatatcttggcagctgcccagaggagaacgtaagtaagagaagagaacaagccatggcttttgagttaaagagaagttatccatgtgacagacaagcacttacacaatgagtagaggagtttagaggaagaatcaaatatgaacatgtcagtgaaaatgtgcttagaatagcaacagaagggataacaaaaactagtattttccaattaattcaaaacagtggttgtatttacaaaaaatgcaagagtatggctctggaagaaactgaagagggagaataggactcggggaagaaaaaatacattgtgcaatttaaggagataattactttctgccctgtcataagcattgctttaggaagatatgcattcttgaggggtgcccctttagccaggtgactgccctgcccaactggactgttagatctccacccaggccaggggttccattctcttgactagaagaaaagattgccctctgggagcttttaattttacggtaacaataggaagagtgatctttcttggcattacccgggaatcttcccattcacaggctagtgaaagacttgttgggtttttgactttcaagaaaatagatctgtatcatttaaagccagtaaaaccagtaggtttttggaaactttatcacagtatagagaagcaatctagagacctttcagaatcctgattttgtacgtcatttggacaaaatgctgatagagtactactgcactttcactggagtattgaattcaatgaaactatacagactaatgttggagtgattattatattaatgttttagaactttcataaaaattttcctcaatcatagtggcttagataataagtttatatccttattgtctagaacagtggtcctcatcctgtgagttgtgacacctttggggatgcatatctgatctactgaatatcatgtatgtataattcttaacagtagcataattgaagttacaaagtaagtacaaaaataatacttgtttgtgggttaccacaacatgaggaactatattaagaagtcacagcatcagggaacttgagaatgcatcaggatgtctaaggtcattctgtctgcaagaaatggtttcacctgatgcttcactccttggcttccatgtactatattttccttgtactcacatgtgacttctcctctctcaggccaccaggcatattggaaaaggggccacttaaataatatgattttaaacattctgtttaaagaaatggtttcccactacacacacattaggagttaaaagtgctgactagatttaactgtcaacttgacaagattttgaatgaggaattaaccagatcagattcactgtagatgtgtctatggaggatatcttcttacctgttaactgacccagcccattgtgggcaccagcatcccctatgcctgagtactgagctgtataaaagtgaaggaaattagctgaaaacaaatggcaagcaagaggcagcttggatgcatttctccactgtctgctcttgactctgaatataatactttcttgccttgatctcataatgatagactatataatgaattgtattccaaataaactctttctttctgaattgcttttagtttggatattttatcacagcagtggaaatgaaactaaagcattaggtcaggtttctacctgtgggctggggcagaagcagtttatcctgttattgttactatgaaaccgtgaaatccatttcagtagtaaaatacaatttttttggattataaaacctttaactgtcatgtataaaatcatgtatcaatataaaagtaaatggtggctggagatatgtttcagcagttaaaaatgctgtataggactcctgttcattcccaacagccatagtggttggagttgctcagttgcctctctaggtccagttagagtagatcagacactctcttctagcccctgcagacaacaataccaaactgtccctccccatatacatacataccaaataaaattaggtcttaaataaataatagataaataatcaaatgcctacttgtatcctggaggtttcttggaagtcctagagtcacagaacccctgaactaggatgtatcccagcatctaaactttgatcaaacagccactgaagtgtgtacttctgcccttttagatttttgcctccttgcatgggaaaatctggtctagattatggtaccatttaaaaaatacttacgtatttaatattttatacatacaggtattttgcctgcaagtgtatgtgtgcatgatgtatatgccttgtgcccaaggaggtcagaagaagactttagttcccctagaaatggatttacagataattgggagctgtcatgtggatgctagaaattgaaccggagtcttctgctagagcagcaagtgctcctagcagcagagccatcccttctgccactatggtcctgtttttttatttttgttttgttttgttttatttatttttttttttttgtattatgtaaagtcatccagagaaactgaaatttgactcaaatgacagaataaatatgggaaattaacatatttcacagcacttctaaattcccctttggagttaaaaacacattgtaaaaaaattcatgcacaactggcatttttctgcaacccccccccccccacacacacacacacacaaatcaagctgtactttcatatcaaagcttttctcttcctgggtagagagactggattgactttttaggaagctgagatgtatctcaaagtctcagtggtttcagttacaaagaagttttagatatgcaaatatatagatggaaatctgccattctccaggggaaactgatcacagaggaaagctacctagttataagtagagataagctgtatattgagatccatcacttgtagatgctaaccacaatagaagcatgctttactggatcatttaataggatatgcgggaattttccataaaggtttggtgtgtttgcagttataaggctctaacatatacagtaaattgtgctttttctgtattaacacactgatggtttcagtttatcaaggcgcgtaatatgaaaaacaatagcttcaaaaactgacagtcttaaattatctgaggaacttgctaaaatgctacagagtcaagaaatttgcatacattctgaagagatggttctgtgaataaaaagcacttgtgtgatgtcctgagtttgaatcccaagaaaccacatggaatctcggtgcaaagcatgagcaattgcagtatcattgcttctgcagagagatgggaagcaaatgagagaatccacagaaactcataggctagaatacacaactctcaagcaagctgggaaggtgaagattggcagccaagattgtcctacttcagtatatgtgctgtggtccacacatccacattcaaaaatattaatgtgaatacaaatacacaaacacacacacatacacacacacaaacacacacacacacacacacacacacacacacacacacacacacacacacacacacacacgagacatacaccgagaaagagaatcagagagactcacagagaagattctagttcattcagtctttagtagaacccagaattggctctgcagcaaacccttttttcctccctaggcaatattaattattcagtctaatactttgactgtttgttacttatcagacatgtttataaatattttataaatgttaacttatttcaagtcaggaaattctgtgtccttgttaatcatgcttgagaggaaagacagcggcagagggctcttgctaggatagcaggcactaaatcatcctgatgatataaggcattggccactacctcattctgatgcaagtgttttctgggcagactttgaaaattatcactaaagactattaacagagttatgaaatctgaccctaagagagtgacaggagagatggctcatgggctaagagcaagtactgcttttctaggagacataatttctaacagtattttaggtgcctcaaaattgcctataacttaagctacagggacctgacaccctcttttgacctcaacaggactcatacctacatcagaaatgtatgcgtacatataaataaagtaagatctgtcaatcatgtatatgtaactaaatagacaaacaaccgaagagaaacaccattaaagcctacttcatgcctaaagttctaaatgctgaatagcttttaaaagtggcatgaggcaaatactaagaacaaacgttaaagtcatagatttctggttaactttgttcatctctgacagagcaaagcaaagcactgtgtacatctctaagtttgcaggtctccacacaatcctgatttcctatgagaaccacttttattccccaaggtgataacaaagtgccagaaggcagcatacacatttaaggttttcaaagtctctggcaaattcaggaactgcacctcattttggcagttgatgtgagaatgaaaggatcatgaacaaggtgagtgtttctgcactttctcaggcagttcaactagagaatggcgagcataagacctccaaggttttagtcaacaatatttattacaggtttcctgctttgtgtcaagtcttctgttagatccctaatttgatcagtaactatggcatatgtaggcaatgacatctaccaaagaaatcaccaagaaattagaatgagtctactggtatctagatatgcagttacagagatcgaaagtaaatgacactaagacataactgattagcaacaaaaataattctaatccaggcttgcttttcatatgcagtgagattgtatagaaaaaaatatgtgagctgagggggaggagggagagcaaataagggaggtaaaagaacaagactagaaaaagtataaagagaagccaaatgacaaaatggaagaagaggaagaggaggtagaaggaggggaaaaagatgaagtggaggaggaggatggagagggtagtgaggagaaggggaaaggggagaggaaggggtggactaggagaaggagccagagaaaaagaggaaagcaatttaaccaagaacaggtacctgcatgtgatcatgttattctgtacaggccaagagcttttcatgtcaaaaaagaaaataaggacatgattttttaaatgtttgggctgaccgtgcttggcagtctagtataaaagactgtagccataaatgaatagatttcaataaaaaccaagtacatatcaaatctgattgtctaatttattttttattggatattttctttattnnnnnnnnnnnnnnnnnnnntccctttcctggtttctcttcctcctggaaataccctatcacatcccccttcctcctgcttctatgagggtgttcctccacccacccacgcactcccacctccccaccctcaatttccctacactggggacactatgcccctccttagaagtgggaacaaaacacccatggaaggagttacagagacaaagtttggagctgagatgaaaggatggaccatgtagagactgccatatccagggatccactccataatcagcatccaaatgctgacaccattgcataccctagcaagattttatcgaaaggacccagatgtagctgtctcttgtgagaatatgccggggcctagcaaacacagaagtggatgctcacagtcagctaatggatggatcacagggctcccaatggaggagctagagaaagtacccaaggacctaaagggatctgcaaccctataggtggaacaacattatgaactaaccagtacccaggagctcttgactctagctgcatatgtatcaaaagatggcctagtcggccatcactggaaagagaggcccattggacacgcaaactttatatgctccagtacaggggaacaccagggccaaaaagggggagtgagtgggtaggggagtggaggtgggtgggtatgggggactttttgggttagcattggaaatgtaaatgagctaaatacctaataaaaaatggaaaaaaaaagaaaatatctaataaaaaaaatttccctacactgggacatctatcgagccttcataggaccaaggacctctccttcctttgatgcatgacaaggccatcctttgctacatatgcaactggagccatgtgtacatctttgttgatagcttagtccctgggagttctgggggaatctggttggttgatgttgcttttcctatgtggttgcaaaccccttcaactcctttagtcccttctctaactcctctattagggaccccatgctcaatccaatggttggctgctaacatccacctctgtatttgtaaggctctggcagggcctctcaggagacagtcatatcaggatcctttcagcatgcatttcttggcatccacaatagtgtctgggtttggtaactgtatataggatgaatccccaggtgaagcagtctctgggtgatcaactttcagtctctgctctacactttatctccatatttgctcctgtgagtattttgttcttcgaaggaccgaagtacccacactttggttgtccttcttattgagcttaatgttgtctgtgaattttatcctggttatttggagcttttgggctagtatccacttatcagtgagtgcatacaatgtgttttcttttgcaattgggttacctcactcaggatgattttttttctagttctatccgtttgcctaagaatttcatgaattcatcatttttaatagccgagtagtgcatcgttatgtaaatatagcacattatctgtatccattcttctgttgaaggacatctgggttctttccagtctggctattataaataaggctgctatgaacatagtggagcatatgtccttattacgtgttagagcatcttctgggtatagcccaggagtggtatagctgggtcctcaggtaatactatgtccgattatctgaggaactaccaaactgattcccagagtttttgtaccagtttgcattcccaccagcaatggaggaatgttcctctttcttcatatccttgtcaacatctgttgttacctgaggttttttttttttattttagccattctgactggtgtgaggtagaatctcagggttgttttgatttgcatttctgtgatgactaaggatgtttaacatttctttaggtgcttctcggtcattcgatactcctcagttgaaaattctttgtttagctctgtacctcatttttaatagggttatttgttcactggagtccaacttcttgagttctttgtagatattggatattagccttctaccagatgtagaattggtaaagatcttttcccaatcagttgattgccttttgtcttattgacagtgtccttcgccttacagaagctttgtaattttatgtggttgtatttgtcgactcttgacctttcaaaaaagccatttgtgttctgttcaggaatatttcccctgcgcgcatatgtttgaggcacttccccaatttttcctctataagttttagtgtatctggttttatgtggaagtcctcgattcacttggacttgagctttctacaaggaaataagaataggtagatttgtgttcttctacatgctgaccaccagttgaaccagcaccatttgggtacagggaagaaaagttaggtaagagaagcaaagaaagacaaggaaaaaggcaaggaaaaataaatggaagatagaagaggaaaaaacaaaagtaatgacagatgaaagttgaaagtgataatttagtagagtatatatagctatcagatattaaaatattttcgttcttatgataagtgtgatgataacattggtggcacaattaagtgtaagaatgactgcttagtgtgtagatgtcctgggtcaggagcctagcaccataccaaccattcagtgttgatacttactctgacaatcattgaaagacattctctgtatttcatgtgcatagaacccctctacactttggctgcagggattataggtgtacaatgactgtcacattccaaagagactctggatttggaggaggcaagatagggtttataaagccccaccaagagcagacctcatggcataaatttcagttaacaaagatttcaaatgatatagttcattaaaataatggtcttcttgaaaattgcagggatggctggataagagtgttctgctcagcgggatgtatttggtggggaactactgggtaagaagcacaagatgtggtcagtttaagttaaatgggtcacttgagaaaatgaaggatttaaggttatcttagacacaagtgagttccaggccagcttgggttacatgagacttgacttcaagaaatcaaaaaaaaaaaaaaaaaaaaaaaaattaacagtcattgttctagtatctccaatgttctttcatttctgtctaatgctgaggtttggattttttattgctgttgacttagaaagctgaacataacaccatctaaaaattaagatatcacctcttaattgagatattctaaaaaaaagttatctagtccagaaattagaactttgatcttagtcatgtagttgttccatggaaaagtttcttaccaatagaaggtaaataataggtttaatttagatttctgggtgattaactattggcttatgatagtcaattatcccttcttcctctcatccttttccttaaagtcccaacctacatcatggtatattatgaacaactgtaagctttataaacacacatccactaaattttatgatttaccatgaaatataattataataatattttctattctagaactggtatcacaataaagcaatattagagatcaaatattacagtggtatgtatatttatatatttttaaaaaaagagtagttaaggagaaaagtgatcatgccaagactctgaggacagaatatgagttactaaattcattcagagaatatttccttcattattccaatgctctgagggcagaatatgagttactaaattcattcagagaatatttcctaagtccccaaagcagatgtggggaaatgagtaaattaatcattgaagattatcattaaccaaagttctaatggcctttgctataataaattgccatgattaacccagacataatttctgctgcatacatgggtaatccagataaatgagatcttggaaagatacactaaaacaaaggcagcactaaaatgaataggtactttgatattttattaaaccaattcatcaaggtttctattgagtgggccaattacaatgccatctatggacaataacactgggtctaaatatcactgaagtctcctgacaggggaggcgagagaaggataatctactcatgttccatctacttttatttaaatgacatttgtttgggcacttaagataaaaatcaataaccacacatccagcttcaagttcctgaaaaggtggcatgtgtgtgatgtgtacctgtatgtgtacatatatatgggaaggcatgtagaaaccagaggccagtgctggctgtctatctttactgatatctgcaatatattttgagacaagcttttgcatatttgtctagaattcatggactcagtaaggatggctgatgagcaaacccaggatagtctctgtctgtggctccccatggattctgggacaaatacccagatcctaatatttgtgtaccaaggactttacccactgagccatgtttctatggcccctagtttctccttttttgctgcttgctatgaagatattcattatgactacattgtacattttgatttagggaatagagtccaggctctcttcagtatttaaggatgataaacaagtaatggatttgaagaaattgaacttgtgttctgtgaggtggactataacagccttcatggggatctaaggttaaggttaatttatgtgaagaaaaataaagggacccagaagatgactcagaagttaaaggtgcctaccaccaagcttggcaacctgattttgatccttggaatacatacagtagaaggagagaactacctcctgcaatttataatctgatcaattttgtgccacagaatatgtgcatgtgcatacacacaggcacacaggtaaatataattgtaaaggaccacttagacattatagtagagttatattcagggcactcgtaacagcctgtgaataacctcaataagtgcagaaaagaaccacaaatctgcaggagggttcaattttcacgattttgagaactaccactgagaatgaaaagattcagtagtgacattagagccagagaggtgaaatgtagtttaactctaaacgattgacactgtgtgtgtgttttaaaagcatgatgccaagtgcccatgtatgagaagatgcagaggttcaccatcaagggtttaaacagaaaaccaatttatactgatgttcaataattcaaagcatatactgttagggtaacattgactactgtattaaaaaaatgcaatgttctgtttcattatctatgccaaatacttcacccagcagacacagatgcacatgagtactttactcacagatacacattgactgaaggttaagaagtatgttaaaaaaaaaaaaaggtgtttaaattgaccaatcccaatatgctaatgctctattgtgcttaaagagacctcctgcagttgtcatattttggtttactgaagattaaagacaagatattactcctttaacaaaactggatggtggtggtagcagttgcctgcctaccaacctgactcccctcctcttcccccaccccaaccctctccttttcttccccttctctccatccccattccctccctctgttcctccttctcttccatcttttcccttccatccttttcttccttcctgtcttccacatcttccattctttctcctgttttcttccatcctatcttccctctcttttcccttccccttcactttcatgtctacgctgccatccctctttcttcttttttcttgcccctccctttcccttcttctatccactcctatattctttctgcctttcttttcttcctgcttcctctcatctttccctcattctcttctcctcttcatctatcttcatttgtatttcatattcccattcttgtcttctgttttaatagactctgctgatagatatacacagtatacatatttccatattcctatgaaacatatttgatgacttttagatatttgtaccagttatggtgtcttactttatttcttttttaattgtataagtatttgacagattttctgaatctattcatcatatttggcttattttgagggacagtatttctctaagaggctaaaactgcccttaaaatactgtgtaaaccaggcttacttcaaactcagcatctttctttctctgcctccagagtgctggggtaataagtgtgcacacttctccaagactcaaatgtgactttttaatggaccttagagtgcacagctataggggctaattttgaattgtatatttgacattcatagagtgtttctctataaattaagaggtctgttctgccttgaccttcaatatgggtgatacttttaaatttggaatatactgcatcagccatgattatgttataaactgtacacctgtacttatttctgatttatttctgtggattttccagaaacctcccaggaacgtgatctcagtgtgtatacttttcactctgttctacatagtagtccttcttatcctggagttattcacctgcttagtctgatcaggagcccttttagcctgtccacgaaggcatagtaatcgatagttccatgctaggctgtgtctctttaaaggaacagaactgatagagcaattatgcattgcaaaggagagttatgagacccccttaccaataaggattgtgaagtccaacattgtctttctagacactgtagaggtggataacttcataactgctcagtcagtaaagctggatgaaccagtaattttaaactggtacttaagacctggaatattcctagagatcaactgatctttagtacacactagaagggaaataccaagttggatccatttttagcaaggatggtggcggctgcaacagcagagttgattcactcgccagcaaggaacaattgtggtgatacaactgcattgtagactttcccctcagaatatcttacatgaggatcatcactttggtcaagaatcttcttgcaatgaatccttctagaaataccctgacacacccactgacacaaatctcttattatatccagatcccaccaatattaaccattttatggcttaacagttgcagtatttttttaaatttttattacatatatttatttgtgtgtgttgtcaggaaggcccttggactatggaaaaattctggagatcctgacgatggaactcagatggtcagatgccttaaccttcagggatatctccctttggctgtctgacaagttttaatgcccattaggaaacttcctacttccttcattctccaaaactcttgaattttcttcagcaatttaggactattatgtgtgagaatgaatcttgtagaagcttattctcactccgaaatgcacaaacttcacattcaataatcttcaaataactaaaatgacaatgtaataagcatctccgagtgatacatattttaagacatcttatcagatgaatagaaatacattttgacaaggaacaatagcttctactatttcccggaactctcatttatgtatcaattcttttgaagatggtatttgatttcggtggatgtattaagaaatcacggcactaaagttttcaggtcatttgttctgatccattttttcaaggggcagatttcaggttgattgcctctaaagcatgcctcagtcacatttaattgtcttaagatgaggacccttccaacattaatccacaaagctgaatgtgccatttgtaagagaagccaactttgaagctgacatttctttggtatcaatgagatctcagctgcagatnnnnnnnnnnnnnnnnnnnnnnnnnnnnnnnnnnnnnnnnnnnnnnnnnnnnnnnnnnnnnnnnnnnnnnnnnnnnnnnnnnnnnnnnnnnnnnnnnnnnnnnnnnnnnnnnnnnnnnnnnnnnnnnnnnnnnnnnnnnnnnnnnnnnnnnnnnnnnnnnnnnnnnnnnnnnnnnnnnnnnnnnnnnnnnnnnnnnnnnnnnnnnnnnnnnnnnnnnnnnnnnnnnnnnnnnnnnnnnnnnnnnnnnnnnnnnnnnnnnnnnnnnnnnnnnnnnnnnnnnnnnnnnnnnnnnnnnnnnnnnnnnnnnnnnnnnnnnnnnnnnnnnnnnnnnnnnnnnnnnnnnnnnnnnnnnnnnnnnnnnnnnnnnnnnnnnnnnnnnnnnnnnnnnnnnnnnnnnnnnnnnnnnnnnnnnnnnnnnnnnnnnnnnnnnnnnnnnnnnnnnnnnnnnnnnnnnnnnnnnnnnnnnnnnnnnnnnnnnnnnnnnnnnnnnnnnnnnnnnnnnnnnnnnnnnnnnnnnnnnnnnnnnnnnnnnnnnnnnnnnnnnnnnnnnnnnnnnnnnnnnnnnnnnnnnnnnnnnnnnnnnnnnnnnnnnnnnnnnnnnnnnnnnnnnnnnnnnnnnnnnnnnnnnnnnnnnnnnnnnnnnnnnnnnnnnnnnnnnnnnnnnnnnnnnnnnnnnnnnnnnnnnnnnnnnnnnnnnnnnnnnnnnnnnnnnnnnnnnnnnnnnnnnnnnnnnnnnnnnnnnnnnnnnnnnnnnnnnnnnnnnnnnnnnnnnnnnnnnnnnnnnnnnnnnnnnnnnnnnnnnnnnnnnnnnnnnnnnnnnnnnnnnnnnnnnnnnnnnnnnnnnnnnnnnnnnnnnnnnnnnnnnnnnnnnnnnnnnnnnnnnnnnnnnnnnnnnnnnnnnnnnnnnnnnnnnnnnnnnnnnnnnnnnnnnnnnnnnnnnnnnnnnnnnnnnnnnnnnnnnnnnnnnnnnnnnnnnnnnnnnnnnnnnnnnnnnnnnnnnnnnnnnnnnnnnnnnnnnnnnnnnnnnnnnnnnnnnnnnnnnnnnnnnnnnnnnnnnnnnnnnnnnnnnnnnnnnnnnnnnnnnnnnnnnnnnnnnnnnnnnnnnnnnnnnnnnnnnnnnnnnnnnnnnnnnnnnnnnnnnnnnnnnnnnnnnnnnnnnnnnnnnnnnnnnnnnnnnnnnnnnnnnnnnnnnnnnnnnnnnnnnnnnnnnnnnnnnnnnnnnnnnnnnnnnnnnnnnnnnnnnnnnnnnnnnnnnnnnnnnnnnnnnnnnnnnnnnnnnnnnnnnnnnnnnnnnnnnnnnnnnnnnnnnnnnnnnnnnnnnnnnnnnnnnnnnnnnnnnnnnnnnnnnnnnnnnnnnnnnnnnnnnnnnnnnnnnnnnnnnnnnnnnnnnnnnnnnnnnnnnnnnnnnnnnnnnnnnnnnnnnnnnnnnnnnnnnnnnnnnnnnnnnnnnnnnnnnnnnnnnnnnnnnnnnnnnnnnnnnnnnnnnnnnnnnnnnnnnnnnnnnnnnnnnnnnnnnnnnnnnnnnnnnnnnnnnnnnnnnnnnnnnnnnnnnnnnnnnnnnnnnnnnnnnnnnnnnnnnnnnnnnnnnnnnnnnnnnnnnnnnnnnnnnnnnnnnnnnnnnnnnnnnnnnnnnnnnnnnnnnnnnnnnnnnnnnnnnnnnnnnnnnnnnnnnnnnnnnnnnnnnnnnnnnnnnnnnnnnnnnnnnnnnnnnnnnnnnnnnnnnnnnnnnnnnnnnnnnnnnnnnnnnnnnnnnnnnnnnnnnnnnnnnnnnnnnnnnnnnnnnnnnnnnnnnnnnnnnnnnnnnnnnnnnnnnnnnnnnnnnnnnnnnnnnnnnnnnnnnnnnnnnnnnnnnnnnnnnnnnnnnnnnnnnnnnnnnnnnnnnnnnnnnnnnnnnnnnnnnnnnnnnnnnnnnnnnnnnnnnnnnnnnnnnnnnnnnnnnnnnnnnnnnnnnnnnnnnnnnnnnnnnnnnnnnnnnnnnnnnnnnnnnnnnnnnnnnnnnnnnnnnnnnnnnnnnnnnnnnnnnnnnnnnnnnnnnnnnnnnnnnnnnnnnnnnnnnnnnnnnnnnnnnnnnnnnnnnnnnnnnnnnnnnnnnnnnnnnnnnnnnnnnnnnnnnnnnnnnnnnnnnnnnnnnnnnnnnnnnnnnnnnnnnnnnnnnnnnnnnnnnnnnnnnnnnnnnnnnnnnnnnnnnnnnnnnnnnnnnnnnnnnnnnnnnnnnnnnnnnnnnnnnnnnnnnnnnnnnnnnnnnnnnnnnnnnnnnnnnnnnnnnnnnnnnnnnnnnnnnnnnnnnnnnnnnnnnnnnnnnnnnnnnnnnnnnnnnnnnnnnnnnnnnnnnnnnnnnnnnnnnnnnnnnnnnnnnnnnnnnnnnnnnnnnnnnnnnnnnnnnnnnnnnnnnnnnnnnnnnnnnnnnnnnnnnnnnnnnnnnnnnnnnnnnnnnnnnnnnnnnnnnnnnnnnnnnnnnnnnnnnnnnnnnnnnnnnnnnnnnnnnnnnnnnnnnnnnnnnnnnnnnnnnnnnnnnnnnnnnnnnnnnnnnnnnnnnnnnnnnnnnnnnnnnnnnnnnnnnnnnnnnnnnnnnnnnnnnnnnnnnnnnnnnnnnnnnnnnnnnnnnnnnnnnnnnnnnnnnnnnnnnnnnnnnnnnnnnnnnnnnnnnnnnnnnnnnnnnnnnnnnnnnnnnnnnnnnnnnnnnnnnnnnnnnnnnnnnnnnnnnnnnnnnnnnnnnnnnnnnnnnnnnnnnnnnnnnnnnnnnnnnnnnnnnnnnnnnnnnnnnnnnnnnnnnnnnnnnnnnnnnnnnnnnnnnnnnnnnnnnnnnnnnnnnnnnnnnnnnnnnnnnnnnnnnnnnnnnnnnnnnnnnnnnnnnnnnnnnnnnnnnnnnnnnnnnnnnnnnnnnnnnnnnnnnnnnnnnnnnnnnnnnnnnnnnnnnnnnnnnnnnnnnnnnnnnnnnnnnnnnnnnnnnnnnnnnnnnnnnnnnnnnnnnnnnnnnnnnnnnnnnnnnnnnnnnattgggtacacttgtgtattatccatgtatgtgaaagccatatatagacatccagtctcatcctcaaccacactaatgttactattttgagacatggtctctcaattacctgcagcctgctgattagaaacactggctggctatcctcacgggttttcttcttctctatcttctgaccagttgtataacaagtgtgtgcctttttaacttgggttctagggaacaaattcaggtcctcctgtgtgtatagccctcagcttactaactgaaccatctcctcaggtcttatgtgttttgagagatctgagaactcttagtgaaggtctccatcactagagctgaaagcttttagcagtgacaaagttaaacatgtaaaatatgactctccaaggaatgtgttcactttataaagtgaaaaataatttagcacatatttttatgatgaacctatattaaaatttaaagtttattacctaattcatttctattttatattttctatctttccttgaccaccaaggtataaaaaagcatcttttaaaatttttcatcagtatcataattgctcttctgggccataaagtcattgccttcatgttttttatttcaatcttttcttacatgcaatattgctgaacttgtgagagtgagattatgtgaatgaaacaatcattttcctctcaagcaaaaaactgtatgcaagaaaaagccacatctatcagcaaggtggcagcatgttctccaatgggccacaagtagcacagcctagggagatgtactgaagaactcaagagcttttgcaaatggctttattcagatttccagtgatacatagagcatgccaaagaaacctgcgaatcactggtttgaagtatattcctctcctagttcactagaacaattaaaaaatatatgcaattttattccagtaatctgatatacttattttgctcattttaatcttcatcctttgattttgatattaactgttctcattttatgctgttgctgtaataaatcatcttagtcaaaagcaaattgggagatggcagagtttatttcttcttaaacttgtaaattattctctatcactgagtgaactcaaggtatgaatgaacctgaaggtaggctggcttgctaccctagagaatttagtcaagagagaataacaggaatcatatagggtgttatttgctgtctctctggttccctgcttccctcccaacttatatattgcttagctagcttttttacattgcccagaatgacctgcccaggaaatggtacagttcacagcggctttaccctcctgtatcagctgataaaataaagacagtcccttatggacaagctcacagaccaacatgataaaaacaatactcaattgagatggttttcaggagcctctaggctctgtcaaattgacagttaatgttaagtagaacattaatcaattaatcaaaaaaaaaatatatatatatatcaattaatcaaactatatatatatatacacacaagcttgcttgtaaattttgctatgtagcagttcagaatattctattagagaacaataaagaagtcagtgattccttcaaaactctgtggtcaagaaagaacttgacatttgctgtagtaggtcacaaaagtacgctgagaataacagtgaccagaaaaccaaagaattagtttggtttctcagccttctttgctgttttttttttttttttttttttttagctcaatgatgcaagtgaaatatagtgctgcctttgtgtctatgtgacatttaagcattgcaaagcttgatgagaaatgggtctcccctcagctttgattacctttaggttgtcaaacacctctgactctattggtctaaatgtagaggagaggcaataatgaataacttactctagctctatgcaaagctgtcatttagtggtacacatgcaagtgtgcatgtggggtgtgtgtgtgtgtgtgtgtgtgtgtgtgtgtgtgcatagaagctggaggttggtgttaggttgttaggtgtctttcttgatccctgtctacactgtacattgaggcctatataactttaacccagaactaggtacttcaacaagtctaactatccagattgtcttaacaatatgaactaaccagtagcaacagannnnnnnnnnnnnnnnnnnnnnnnnnnnnnnnnnnnnnnnnnnnnnnnnnnnnnnnnnnnnnnnnnnnnnnnnnnnnnnnnnnnnnnnnnnnnnnnnnnnnnnnnnnnnnnnnnnnnnnnnnnnnnnnnnnnnnnnnnnnnnnnnnnnnnnnnnnnnnnnnnnnnnnnnnnnnnnnnnnnnnnnnnnnnnnnnnnnnnnnnnnnnnnnnnnnnnnnnnnnnnnnnnnnnnnnnnnnnnnnnnnnnnnnnnnnnnnnnnnnnnnnnnnnnnnnnnnnnnnnnnnnnnnnnnnnnnnnnnnnnnnnnnnnnnnnnnnnnnnnnnnnnnnnnnnnnnnnnnnnnnnnnnnnnnnnnnnnnnnnnnnnnnnnnnnnnnnnnnnnnnnnnnnnnnnnnnnnnnnnnnnnnnnnnnnnnnnnnnnnnnnnnnnnnnnnnnnnnnnnnnnnnnnnnnnnnnnnnnnnnnnnnnnnnnnnnnnnnnnnnnnnnnnnnnnnnnnnnnnnnnnnnnnnnnnnnnnnnnnnnnnnnnnctaaagcattgttttgcatactttatgtctgaagttttaacatttttataacatttatgtttctttagcagaatgtgactctaggaaacaatttgatccacttctgagactcagatagatgggaaatttattcatcttcaagataatatttttacatgatgaatttttagatgaggaaggacctattaagtaacagtctctgtggggtgtatccttggtgctgagtggtccacgaaacatctacaggaaggtgaagcccgggatgtttgcttcttcagggagacaggaaccctattaataactgaaaaaaagcacatgcattataaatacttgctttttaaatggaaagccataaatccatcttaggtaaatggagaaaaatcaaaaggaggactaactcactctaaaggaatggcctttctgagattttatctgaaaagagaagctctggagacagccctatctttgaagttatacagagtcccttttcaaacaaatgtgagtcctatgacttggtggaaggttgtaagctgagtgatttattacttatttttcttgtagccctgaaaaaatataccagacaggcagctaaaggaaggaaggtcttctttggctcacagtccaaaaacatggtccatcaggatacaaaattctttatggcagtgtcatggtatccacagtcaaggaggcagggacaggtggatgttggcatgtaattcacgttcccctttaattcagtacagaaccccattacgtgaggtgataccacccacatttatggtgggtcttctcaagttaattaactcaatctagaaagtcctctataaatttatctagaggtttgtcttcaatgtgagtctagatcctgagaaattgataaccagtatttacaacaacagatgatggctaccagttgtcacagtccccttcctggaagggtgatactaaactgtatttaagtatgtttttctccagtcttcctttttcagccctaggaaaccttaataaaatacctggatgctaaacctgatgaagaaactatccacttctcactcaaggtcaagctgtcttgggatgtttatgtctcagtcatttaaatatttgttttttaagtatgaggatctctgagttatatcctttggatatatgtatgctattttttagttttaattttgtttttaaagacaggtatgttggcatgtacttgtaatccaagtactgagtggataaagacatggacatctctggggctcactggccagataacatagacatcagtaagtcccagcactgtgagaaatgctgtcttaagaagaaaatgtgcacagtttctgagtttatcccctggtctttgcaagcttgaatgtacacatgtttacatatagtagcatacannnnnnnnnnnnnnnnnnnnatatgagttactaaattcattcagagaatatttcctaagtccccaaagcagatgtggggaaatgagtaaattaatcattgaagattatcattaaccaaagttctaatggcctttgctataataaattgccatgattaacccagacataatttctgctgcatacatgggtaatccagataaatgagatcttggaaagatacactaaaacaaaggcagcactaaaatgaataggtactttgatattttattaaaccaattcatcaaggtttctattgagtgggccaattacaatgccatctatggacaataacactgggtctaaggtatcactgaaatctcctgacaggggaggcgagagaaggataatctactcatgttccatctacttttatttaaatgacatttgtttgggcacttaagataaaaatcaataaccacacatccagcttcaagttcctgaaaaggtggcatgtgtgtgatgtgtacctgtatgtgtacatatatatgggaaggcatgtagaaaccagaggccagtgctggctgtctttctttactgatatctgcaatatattttgagacaagctttttcatatttgtctagaattcatggactcagtaaatatggctgatgagcaaacccaggatagtctctgtctgtggctccccgtggattctgggacaaatacccagatcctaatatttgtgtacccattgagccatgtttctatggcccctagtttctccttttttgctgcttgctatgaagatattcattatgactacattgtacattttgatttagggaatagagtccaggctctcttcagtatttaaggatgataaacaagtaatggatttgaagaaattgaacttgtgttctgtgaggtggactataacagccttcatggggatctaaggttaaggttaatttatgtgaagaaaaataaaagggacccagaagatgactcagaagttaaaggtgcctaccaccaagcttggcaacctgattttgatccttggaatacatacagtagaaagagagaactacctcctgcaatttataatctgatcaattttgtgccacagaatatgtgcatgtacataaacacaggcacacaggtgaatataattgtaaaagaccacttagacattatagtaggactatattcagggcactcgtaacagcttgtgaatagcctcgataagtgtggaaaagacccacaaatctgaaggagggtgcaattttcacgattttgagaactaccactgagaatgaaaagattcagcagtgacattagagccagagaggtgaaatgtagtttaactctaaatgattgacactgtgtgtgtgtgttttaaaagcatgatgccaagtgcccatgtatgagaagatgcagaggttcaccatcaagggtttaaacagaaaaccaatttatactgatgctcattaattcaatgcatatactgtaagggtatcattgactactgtatttaaaaatgcaatgttcgggttgattacctatgccaaatacttcacccagcagacacagatgcacatgagtactttactcacagatacacattgactgaaggttaagaagtatgtttaatagctgagtagtactccattgtgtagatgtaccacattttctgtatccattcctctgttgaggggcatctgggttctttccagtttctggctattataaataaggctgctatgaacatagtggagcatgtgtccttcttaccagttggggcttcttctggatatatgcccaggagaggtattgctggatcctccggtagtactatgtccaattttctgaggaaccgccagactgatttccagagtggttgtacaagcctgcaatcccaccaacaatggaggagtgttcctctttctccacatcctcgccagcatctgctgtcacctgaatttttgatcttagccattctcactggtgtgaggtggaatctcagggttgttttgatttgcatttccctgatgattaaggatgttgaacattttttcaggtgcttctctgccattcggtattcctcgccaaatggatggacctggagagcatcatcctgagtgaggtaacacaatcacaaaggaactcacacaatatgtactcactgataagtggatactagcccaaaacctaggatacccacgatataagatacaatttcctaaacacatgaaactcaagaaaaatgaagactgaagtgtggacactatgcccctccttagaagtgggaacaaaacacccatggaaggagttacagaaacaaagtatggagctgagatgaaaggatggaccatgtagagactgccatatccagggatccaccccataatcagcttccaaatgctgacaccattgcatacactagcaagattttactgaaaggacccagatgtagctgtctcttgtgagactatgccggggcctagcaaacacagaagtggatgctcacagtcagctaatggatggatcacagggcccattggacacgcaaactttatatgccccagtacaggggaacgccaggnnnnnnnnnnnnnnnnnnnnggaagacaggaagaaagaaggaaggaagaaatttcatctcttcctttccaaactctgggaacccaaacagacctttcatttggtgaacagttttgtggatgttagggatctgcatacttgtgtggccagtgctttactcaatgagccctctctctgactcctgttcctaaagcattgttttgcatactttatgtctgaagttttaacatttttataacatttatgtttctttagcagaatgtgactctaggaaacaatttgatccacttctgagacacagatagatgggaaatttattcatcttcaagataatatttttacatgatgaattttagatgaggaaggacctattaagtaacagtctctgtggggtgtatccttagtgctgagtggtccaggaaacatctacaggaaggtgaagcccgggatgtttgcttcttcagggagacaggaaccctattaataactgaaaaaaagcacatgcattataaatacttgctttttaaatggaaagccataaatccatcttaggtaaatggagaaaaatcaaaaggaggattaactcactctaaaggaatgccctttctgagattttatctgaaaagagaagctctggagacagccctatctttgaagttatacagagtcccttttcaaacaaatgttgagtcctatgacttggtggaaggttgtaagctgagtgatttattacttatttttcttgtagccctgaaaaaatataccagacagaggcagctaaagaaagaaaggtcttctttggctcacagtccaaaaacatggtccatcaggatacaaaattctttatggcagtgtcatagtatccacagtcaaggaggaagagacagatggatattggcatgtaattcacgttcccctttaattcagtacagaaccccattacgtgaggtgataccacccacatttatggtgggtcttcccaagttaattaactcaatctattaagtcctctataaatttatctagaggtttgtcttcaatgtgagtctcgatcctgagaaattgataaccagtatttacaacaatagatgatggctaccagttgtcacagtccccttcctggaagggtgatactaaactgtatttaagtatgttttttctccagtcttccttgatcagccctaggaaaccttaataaaatacctggatgctgaacctgatgaagaaactatccacttctcactcaaggtcaagctgtcttgggatgtttatatctcaatcatttaaatatttgttttataagtatgaggatctctgagttatatcctttggatatatgtatgctattttttagttttaattttgtttttaaagacaggtatgttggcatgtacttgtaatccaagtactgagtggataaagacagggacatctctggggctcactggccagataacatagacatcagtaagtcccagcactgtgagaaatgctgtcttaagaagaaaatgtgcacagtttctgagtttatcccctggtctttgcaagcttgaatgtacacatgtttacatatagtagcatacacacacacatgtacatacacacaaacaaacacacacacacacacacagagagagagagagagagagagagagagagagagactgcatttctctttgatctcttataaacctcccatatccccctccaaaaaaagcctctgtctccctactgcattgacaattccccacagaagcagggctttgctataatgagttgctagactatagaagttctatactctaagtataactgtcatgattggcagtcttcatctcctactgttaaatacatgcttgtaagggttaccctgcttcatttcacattggtatcacaacctaaatctagtacttgctaattttaccacccacagcagccatgaactcctaagtattatctctccctctgctaatctaatatcaacatcatgggctatttttatgctattcactggctcatttgtttttccatttatttagtgtgtatatatctgtgtgaatgtggacaaatgtgcaccagagaatgaccagcaggaattggctctctcctgtcacagtgtggatccctgggagcaaacataggtcactagtctttccagcaaatgctgtgccattttaccagaaccccttaggttttctgcaaatactatgtagctatttctttcttactgtatttattacaaaactttctgcataaaatagctatagctgcctaagctctcagaatttctaattttatttagcttacaatagttgaaaaaagtatgaagtcattcagtttattataagaactactaattagtacgaatttttatttacatttaaaaaaatattggagtgtttattacaatttaacaaatgacttcatggtttactctttataacctattggttaaaaggcgtttgaaagagataattatgatttcatgatacaaagtaaggctagtttgatgatattgaagtcaaagaagaaataatcatgtgtttatttttgttcttttttttttttcagaaatagatccttagattcttttggaaatcaagaacttgagggattcaggcagggaaggatcaacatttccctgtcatgagcacacgttatgccagcaatgttatactttatggtaaattagaagcattgtgtttgcatgatttctttcattttgaagatactaaattattttcccatacattctatccaataacaccatttctgaggaataatataaaagaccattctttgttggtttgttttttgaagaaactcttccatgatttcattatttgactgtgttaaccatactcagtgtcacagtctggcctccaaggagccaaatctagcacccatcctggtgaacccagttaaagagaaaatatcacatgaaaagcagaaaaggaaggcatatcccatgtggtcataaggagcagacagccaaagtgatccaatgactctggagttcatctcttgagtcctgagatcagattgaagtttagactactcaaagatatagacaagtaaggaggcattgccaagactcttagagaaagtgaacccagctgctgattctgcattttatgtcacttgttgaaaatctagttctcagattcttatttagctatgtgaagggcttgtttgtttgtttgtttgcttgcttgtttttggcttttcgagacagggtttctctggctgtctgggaattcactctgtagtcaaggctggacttgaactcagaaatctgcctgaaactgtctcccaagtgatggatcaaaggtgtgtgtcaccactacctggttatttggtctttacagaattaaacaattgctatttatttagctcataaaattaaaatatttttgtctaagaaataaaatttctgacctagcttatttttgtcacgtaaaacctttaaagtgaaatcttaattcttaaaataaagtcttacattccacaggggttaaccagtgttagacattcacttacatgcttttaccaacccttcattggtatatcttttgaaatagcagaacacataatttatctcaaaatttatatattttggtggcatgttcctataatttcaatactccagagccagaagcaagaggataagaagttctaggctagtcagagaaacagagtaagatattatctcaaaacttaaaaattaaaattcaataacatctcaagatgttacagtcttcacaacagattacagcaggaatattctctgctctcatttgcttcatcttgtggagctggtcactggatattgattaacttttaaaatgatttttcttgccttgctttttagaatttacattgtacataacagtagataacagctgtttatacacttggcaaaggcactaccaaactctccaattgaataagttcagatgctcctgcgtctggaaaggtttctcccctctgagtgggtagaaaactgggctactgtgttgattagaccaattctgtcttcgaggaagtcacactcacacgagtcagctttcagaacacaggacttgtgtgattttgctgtgcatgcttgctggctgttctcaacgagagtcctcttgtgtgtttagggataaatacaagccctcctacaacaacagaaatgaaacttcattctgattttctaaatcatgacaatccttgtctgtgccacttgaagagataagaagtgttgaaaatatccaacaaaggaaaggagagaatgagagctttcatgactcttcttctgcatgattagagccattgaagtgcccttgaccatctcaggtggggatggctctcaagtggtttgctcttccagatatggcatagtaggggaagaagagcgttctaagaagaaacacagacaagtaaaatctgagcatggggagagcctctgtcagtatagtacttgttttgcaatcatgaggactagagtttgatctcagcacctgtgttttaaacaaaagtaccagactccattttgacatttccaatctgaagagccagaggataatatagctaccacaaagacacaagaaaaatatcaggaagaatgaattactgctagtgaaatcaaaagtgcatcgtgtgagtatgtaattagtagcccaagctgtataatattcataaaggttatcaaaagcagaaattttaggcctagagagatacctcagcagttaatagcacttgcttcttatacagagaatttaagttcagttttttgcactctcaacaggtagcttccaaactctgtaactctagctcctgggatctaacattcccctctggagcaattggatccacatgtacttacatacacatgcccaccataagtgaaagtaaaaggtaaagaaaaaaagtagataaaatgaattatgaatgcaaatatatggtttaaagaaaaagctggaatatacttgtattggtggatgagaataacaaagggtgtttgataggactatgaatgtttggaattcctctccaagagtgtgaactcaataaagaaatgtaaattttcaagtcccaaattattcttattaggaattagttgcttccataacaattttgaattttaataccttaacataaccttaaagatcaattttcatacatgagttctgtgtttaagtatgtgaattgagtttctcagtaagttagaatggagattcaagccagttcatgagatatcagtagtcactgaggtttgattggtgcccaagagatgacattgaaccctccttatgggtggcagggcactgactgtagagaaaggtcctagttttcccctcatgagtcagcataggaattcccttaactcagattaagtgattcaagaaagtgattcatagtgattgcgcgattcacaaatgaagaaataccacttttgtttactttatgatgtcacaaaatgctcagaggtttctgagattaaccctacacattatgggaaatattgatgagtcatagaatattttgagagctatctaacatatgctttctgtttgtgagtgtgtgtgtgtgtttgtgtatgtatgtgtatgtatgtaaaaatatgtatgtgtttgtatactcctccctaaggcagaatgtaatgaccaaaaaaacccacaaaaaatctgtaaggttagccatgtcagtcattaaaaactagtatgttttagagttgtccatgtaaaaggagctgaatgtctagccttctcctgaaatgtaggctggtatcaatttgcttcattgttttgttttgttatcattgacaaaattcttcattttcttaagagtgtgctaagttttctcttttatctggttggcattcagacggataacctgattcacggtttgcacaagagagagtagttacaatagactgttttgtattgacatctctaagagagctgcaaatcccaagtttccagaaaaaaataaaaataaaaaccagaaattgagagatgtgagaggagagaaaataatattcaaggtgaattttttcagaaataatccctctttcacagtagaatattgatattcataaacatggcaggaaattaattcacacacttgataatggctgaaaacttggatgtcaagacttaggtcttcccctgcatatctgtatcataacagattgatgtagttagcattctcaaggaagaaaggaaatagaattctaacaaaagctgggctgtgtgactaatattctcgaattgtagtgcatggaacactctcatgcaggaaatgaaaaaaggaaaaaggcagctaaggatcctaactttttattggggtagtgagatgcgtaaagatagaaaatagatcacttctaaattaacagtctgcactttagagaaatagcatgtgttcctcctgaaagaactatttagggccacatttaaaaaaaaacaatcttcatggaggcaataaacattttaaaaagaaaattaatttcttcaagggaacaaaatgcagcccatgaggaaagtgtactccagtgggagaatgattatgtctttgtcaacatgccttggcaatgtcagattttgagaaagtttgctgtacccacagccttaaaataacctgttgcaatttaaaaaatattcttcatttatttcatacatttaagatgtttatgatcatatccccccatacttctaattccactcagattcctcatttccacctcctgtactctagtcatcattgccacagtcactgccatcctcttgatcttattttgtctcttcctcttctcttataatccacagagttgctgctacacatgtgtgctgccttgtctagtgtcatactctagagactgggcaactgactgtgggtaacaacattgaaggaaactgactctccttcctccagtggccattaactgctagttcttcctcaactagggctcaaacatctgtagtgtcttccttttccaagctggagaattgactggcttagtcaacacagctgacctacaatctttcaatgatagtagtgagagtctaccctatgtcttgaatataaaatttatctatggcttgattcttcacatgaaacttctttataaaactagacttttttggtatgtgtgcatgaatgcaagaaaacatacatacatacacacacacacacactcatcaaatgtcttctggctgcttttcttctactgaaacatatagacacaaaatagaagtctatggggatctaatgttaaaattaaaagatgttgcataggcaatataatgagcttgatatgatgtgtaaacatttatttgaaagccattcggttacttttgtactgtcaggtctaggactttctcatggctgaatgtgtctaggttgttgtctgcctctccatgttgtgttatgttcatcgtgattacaaggtgtgcttccaagtagcggattcattcttctaatattctgtctgtttttttttcatattccatggcctaagacttcatcttcattcatttcctaggagcttgagacagaaatcttcatctctatttgattcataatctacatttagagtcaataattgcaatatgtgttttcatgaaagcacacccaaaccatgatttgcacataagtagagtgctttgctactgaccctaaggaacactctcttagttctcctgttgctgtgataaaatactctgccaaatcaacttagcagaggaagggattatttgggcatttgttcaaggaacaactcatcttaatgggaaggtcctggcagcaggatcttgagagcagctgctctagtcaaacccacagccagggactagaatgatgaatactagtattcagcccattttcttcttcttaaataatccaggatcatagtccaggaaatcctgtcatcttctgtggatatatcttcccacttgagttaacttaatcgagataatcccctgtaggcattcccagtggcctgcctcccaagtgattcttgatcttatcaagttaacaactgagattacccatcataaattcctagtgacaatgtgtgaaatggaatgaacgaccaataaatataatgttgaacacattagtgtcatgggtgagcagaatttattctttctgatatgttcccaaggaacaaatataatactgctcacatgttagtgtgagcaccatggctgtgtgctgaggtgaaaaagacagactcagtgtacagttaaaacctatcttattggcactatttgtcaagcaattatgtggactcccagagataatattataattgaactgactggtgtgtcttatgatggtaccactcaggaatttcctaatggaattcggtgcaagtaaggtaggatccaggggtcatatgtggagtcatggtaccaatcacaaccttgataaattcctccccttagagagatgtaaagatgacagagcaggtgagagtaattactttatttttattgtatattttatttatttacatttcaactgttatttcctttcctggtttcccctcaggaaatcccctatcccattcccctactccctgtttctatgagggtgctcccctgaatacccaagatacaattcacagactacatgaatctcaagaagagggtagagcaaagcgtggatgcttcagtccttcttagaagggggaacaaattactcacataagaaaatatggaaagtatggagcagagactgaaggaaaggccatctagagaatattttctgttcttgcagagaacctgaaatcagccctcagcacacatatccggaagcacacaactatccataactcaaactccaggcaacccaacactctggtctggcctttataggcacatccccatacatagtgcacatatatacaatctcaagacacataagcacacatgcacacacaattaaaaattaagggctgatgagatgactaagcaattaatcatgcttggtgctgttgtatgtgaccctggttcatttccaagtagctaaactgaatgactcaaaacagcctgctcctccagttccagggtttctgacaccatcttctgtcttcctagttatatgcatgcatacacagacaaacacatatacataataatattataatttaaaatctttaatttcatttaggcaaatttataattactatttactttatgtatgatttcacagtttacacagtttaaaaaagttattcatagcactaaggttgaacaattattcctagcagacctgtgtatgtccatggtaggggaggccatatctagcatgcaatcttcagttattctcgctgttaaacacactgataatttcaaccaagccctaatagctgcatgagtaatagtgtagcattctctagatatcacagttttataagtcagagaagtctcttataggacacacataaaaagtttccctgcaaccagagggcatgttttctgaattctcataagtccaaaagtcatctctttgaggtatgtcagagatattttctacctgaaggtagtaaatgggagatacataaaaaacataaaacactgtttacataattaagggacatgaaattaacttataaactactcacataactctctggaaagctttagtactctttcttatatacaccagagcacaagtatattgagtcaatttaatattacttcaactaagcaaatgtgaccaaacttcaaacacacacacacacacacacacacacacacacacacacacacacagagagaaatagagcacacagacctatgcacagagacataacacatatacaaatgcacacatgtacacgcacatatgcagttttggaattaccttgctgttatcttaacaaaaggttaagacaaagctggcttttgttctcataaacaaaacatgtgtggatctggttatcttctctgtgccatcaaatccatttggattgcttgaagtctcccggtggctgaagaaataactgctatgtgcgtgaattcttacaattctagagtaaagctgcaatggttcagtaaggtgaccattgtaactgttacatttcaactagtcctttccaactacatactaggtagacaagaaagattagaggggaaaagggatagagatatcttgagagtatcccctgctgattagcaatgtcaagttcctttggtcaagttcaatcttaaccaacaggataaatcctatcagcaaacagcaacccagcaaacagcaaaagtagtagcagagacaagatttagcaaggaccagcagcagcagtggcagcaacaggaagagcagctgccaccacctctcaggactctgacattttatacccttttaagcgtccccagaattccaaatgtaaactatcttcagctagcagaaccaagttcctggtagagcatagggtaaatcatagttagctgctgtggagaatctgaaaaatccctatatcctacacctgggattacagtgaaaacatattcacataagacacctgtttttgttgtgtttttttttttgtttttttctcactatagagtgtgatgaagttttctttttcttcttcctcttctttttcctcttcctcttcgcctcctccttctccttcttctaccactttttcttaaatttcaattttctttggtaagtttttaattgagtgaaatgcatttgcattcataaccaccctacttcctatttcccactcctccaaggtgtgcccttttatatcttttcagctacaaatcataatttttgataacccactgagtctcattgtcctctgggtgtagttcactatcccctggagcatgggcagcctgctatgggctgagtggctgaagaaaagcagtttgaaagcacacagtcttttctctactgttttctattctgctggctcttttctttcactcactggcagatttccagaggtgtcattcatgataaaaggggaaataacctctatgatatctctaaaaatgtttcagaaaaatcaagtttgagtgaaatccaagacattgtttttaagaaaattgggaatcagtgaaattttagagagagtggaggctaactcagtagtaactaaaagttaaaattatgtaactaaagtttttagcttttatatagttcattttttcattttttgatttatttgttcattttacaccctgatcacatacacccctcttcccagttcactctcacactgtgcctctgttggccaaatttccctttcacctatggaaagggagaagtcccctcgcccgagtcatgtcccaacccaccctagcatctcaagtcattgcagagataactgaagatttaaaatgaagaaaaactttcaaagtatttcttttaactttactaagaaataaatctaattaaataatttggcaagtattgaaagttgtgaaacctattaaaaaagaaaagcaaaagcaagcaaatatttaattgtttaatcatagctacaacacagagcatattttgattatacctttaatttttctcacaaagaactgtattggtacagtttatgtaaacattagttttccttttacactaccttatttctaaaatatttttgactcggctttctcaaaaggatattctcagaactacaagttctagaatagcaaagaaggatgactgtgctgtgcttgcctggatggtctatgcaaacacagacatacctcatagggttacagctttgtggaacagtagtaagagttctcattaaacactgctgagtgtggtagcagaggataattatcccatctctggaggtggggggtggggtggtaggaagatccctgagactccctggtcagccagattagttaaatgagctcccagggagagagtgaccttgtcccatattacaaggtaaatggaacctgaagaaaaacaataggtttactgctgaacttcaaatacacacacacacacacacacacacacacacacacacacacacacacacacccacacacacctgcccacacaaaaccacatggacatgtacaaagattatagcattaaaaattaaataggttttcaataacctgcaattatctactaaaacacaaattcaagcagaaagatgcttattgaacaaaaatggtgggataatatgtctcaaaatatagagattttgtgaaaatagttcatttatatgcagcagaaagcaagagcctcctgtctcaatttgagaaacattattgagttcataccaagacagttattggtagagattaaggaactccggcatttctaatattttgtaaaaatgaaggctcaattaatgaatctggaggtaggtgtgtcactggggattccgactccttttccttttccagaggcgactaaaatagaagttatattagagaattggccttgacagtccatttagaaagaaggatttctccgcgttttaattaaacagaggtgatagatctgtgaaatgagcatgcatcattagaccaatcatttcaaagattagatactttcttctttaatccaggaacttacaaaattattaacaattctaagcttttcagacttgcttaaaaatcaaagagcattacttggacggagtggcgaatgcctgctcaaccaagccaccacacagtgggagaggaaggatggtctgaagtttagggccttcttttcttctagttagcatgttcaaggtcaaccctgggttgcatgacatactctatcaagctaaaaataaatctggtttagattaaaaaattgctcagctttcatacactgtataaaataactctggaatcccagagtttgacaacaagatttattttattctagctttgttaggatgctcctattctggacctggggtatataatgagggcatacaatggcaataataaaaatattattgagtaagcaagtaagtgcatatgtagaagtaatgtgataaagactatccacacattgtctcttgttcattctctcatggctgtgatatggataatgctatgatttcatagctttccatctccatgctgaggtaacttactcacagagaattaagtcaaggcttgaacactccagtatcaccactgtagcctaatcaagcacagagaattctgggtccttgccaggatagttcaatctctcaacaacaacaacaacaacaaaattcttaaaacattttgacagggtgaactcaattgcaattcccctaccatgagtctatcacagcttgcaatactagtacaggtgagcttttgagttctttcaccacaactctttgggagagcttaatgaagttagttattccttctccctgagtcccattattcctctgttatctaaaacaacctgagctcttcatctggcctcttgccaggtgaaggtcacttctttgactcatttgcattattcttttcttagaaaaggaaaacaggcaaactttcaggttataaaactcctctgatagaacaaaactttcttttattggttattttatttatttacatttcaaatttatcccccttcccagtttcccctccaaaactccctatcccatcccctctttcccctgcttctatgaggttgttctctgacccacccactgctgcctcaccaccctagcattcccctacagcagggagaattgagcctccacaggtccaacacctccccctcccattatgccagataaggccatcctctgttacatatgcaactggagttatgggttccttcatgtgtacactttggttggtggtttagtctctgagagagctagggtggtctggttgttcttatattgttgttcttcctatagggtgccaaaccatttcacctccttcagtccttcctctaactcttctattgtttaggttggttacttaattttgggggcttataattatcacatttcctttggacattcctccccagaaactctcccacatacctcttctgctttccttcaaatctattccattatctttcaattaattgttattgagtttacatatgtatacacatatatgtcccaaaaaataacctgctcagtctctataatggtacttgtacatgttttcaggaatagccatctggcactggatggccagttggtgtgctatttcctgaagaagcccacttttctagctcccatctttcctcagttgcctatagttctctgtaaagtcaaggcctcatggatttttttccctgtctactttgtcatgtccatccaagtagatcttgttcagttaacactggggagtcatgttggcaagactttatgggtttagtttctggcattactaggagacacagtctcagagcaaacactgagatcctctttcttacaatctttccacttcagctcctttaaagttccatgactcttgggtacaggagtggtttttaagtgtatcattgaagttgtatgccgagactctgagtttgattaggtgtaggttctctgtagtggtatacatcttttggaaactttttcttgatgaggaatgaaaactatgcttatcaatgggcataaagccaaatgtttagattgctgttagagattaagctggcatagtaaattagggattataaattgtcccacaatatccttcaactggtacttaacctagctttccaagagcatcccactttttgagcaggtcttaagctcaattagagagctgctggttaccagcaggtatgggtgccagtactatactccctagggttatgtgctatgctaattgttgatgtgattcacaggcatcaccacagaatatgactgctgcatgcctcctttcttgaatgttatttccatgaatgctagtctgaagagaggaggcattctggtctgatacagttcaggagtctctgggctgcatttctgaagtgtacagtctttagcaatagggatttatcttatacctcttaggggacaatcaagatcaatagaaacagactttatgttttggaaatctcttggacaaccctggcaaacaactcaaaagaaggtttttcacatctgatattggttggtatttatattgtttatttttgtctgtctgtttgtttgttaggtgatctttggcccttacagggaccactgccagcctagatgaggaaagttcattaaaactatagatatacatttatacacagaaattcatgtattataggcctttttaaagacaaatagttaattgtatgattccttgaaattttaagacattcttgttatattactctcctccctattcctgtatttacctcccaccctcttcctagaagtctctcctttctcttttcccctgccagatcacctgtaccatgctattcccatctccattatacccgaattccctaccaatggctgtgttttgcttttttggtttctctattattctgagatatgtactaagagctgaagatttcaaactagctgtttccagtgaaagaggacacgcgatgtctgtctttctgtgtctggcttacctctataaatatgatcatttccattattatccacttacttagaaaagtcataatccaatttttatgtctgaattgtatagcataatgtatatgcacaacattttattatacactgtggctgggtaacaggcctggctgttctggaactagctctgtagaccaggctggcttagaactcacagagatccacctacatctgcatcccaaattcttggattaaaggtgctcaccactactgcccggaatgtgtagattgatgattttattaagatgcccctttttactgtattaatcttactaatccttaagtgcgggaggagttctttccttcttctgatatctcccccaatttctttcttcagtgccttaaagatttataacacaagtgtgtcacttgcttggttagagctggcctccctcaagatgttttattatttgtgaggcttttgtaaaagtttttgtttctctgatttctttctcagtccatttattacttatatatatgatgattttttgtgtgataattttgtaatctgctattttgccaaaaaaatttttaaatcagctatgaaaggtttctggcagataattttagatttttttcctatataaaattatataatgtgcaaaaaagatatgttgattatttcctttctgtttgcattagtttgatcttcagttttcttactgctctagttaagacattaagtactatatatggactatatgtatagagaaaatagacattgtcttattcctcattttaatagaaatgttttgagtttctcactatttaggttaatgatggccatgggcttgctataaatacccatgaaaggagttacagagacaaagttcagagctgaggcagaagaaaggaccatccagagactggcccagccagggatccattccatatacaaccactaaacccagacactactgcatatgccagcaagattttgctgacaggaccctgatagtctcttatgaggctatgccagtgcctggcaaatacataagtggatactcacagtcatctattggatggagcgcagggcccctaatgaaggagctagaaagtacccaaggagctaaaggcgtctgcaaccgtataggaggatcaataatatgaactaaccagtacccccctcccctgcccccgagctgtatctctatttgtatatgtagcagaggagggcttagttggccatcaatgggacgagagacccttggtcttgcaaagattatatgccccagtacaggggaatgccagggccaggaagtgggagtggatgggttgaggagcagggcagggggagggtatagtggacattcaggatagcatttgaaatgtaaaggaagaacatatctaatttaaacgataaaaaattatataaatcttttgataatgttgaagtatggtctttgtatccctagtctaaaatgttcaacatccttaatcatcagggaaatgcaaatcaaaacaaccctgagattccacctcacaccagtcagaatggctaagatcaaaaattcaggtgacagtagatgctggcgaggatgtggagaaagaggaacactcctccattgttggtgggattgcaggcttgtacaaccactctggaaatcagtctggccgttcctcagaaaattggacatagtactaccggaggatccagcaatacctctcctgggcatatatccagaagatgccccaactggtaagaaggacacatgctccactnnnnnnnnnnnnnnnnnnnnnnnnnnnnnnnnnnnnnnnnnnnnnnnnnnnnnnnnnnnnnnnnnnnnnnnnnnnnnnnnnnnnnnnnnnnnnnnnnnnnnnnnnnnnnnnnnnnnnnnnnnnnnnnnnnnnnnnnnnnnnnnnnnnnnnnnnnnnnnnnnnnnnnnnnnnnnnnnnnnnnnnnnnnnnnnnnnnnnnnnnnnnnnnnnnnnnnnnnnnnnnnnnnnnnnnnnnnnnnnnnnnnnnnnnnnnnnnnnnnnnnnnnnnnnnnnnnnnnnnnnnnnnnnnnnnnnnnnnnnnnnnnnnnnnnnnnnnnnnnnnnnnnnnnnnnnnnnnnnnnnnnnnnnnnnnnnnnnnnnnnnnnnnnnnnnnnnnnnnnnnnnnnnnnnnnnnnnnnnnnnnnnnnnnnnnnnnnnnnnnnnnnnnnnnnnnnnnnnnnnnnnnnnnnnnnnnnnnnnnnnnnnnnnnnnnnnnnnnnnnnnnnnnnnnnnnnnnnnnnnnnnnnnnnnnnnnnnnnnnnnnnnnnnnnnnnnnnnnnnnnnnnnnnnnnnnnnnnnnnnnnnnnnnnnnnnnnnnnnnnnnnnnnnnnnnnnnnnnnnnnnnnnnnnnnnnnnnnnnnnnnnnnnnnnnnnnnnnnnnnnnnnnnnnnnnnnnnnnnnnnnnnnnnnnnnnnnnnnnnnnnnnnnnnnnnnnnnnnnnnnnnnnnnnnnnnnnnnnnnnnnnnnnnnnnnnnnnnnnnnnnnnnnnnnnattggaaatgtaaatgagctaaatacctaataaaaaatggaaaaaaaaaagggataaagtattttatcaatgggtttttctgcatataatgatgatcatgtgggttttgtcttgtaatcttcttatgtggtggattgtgtttataaatttttatatgttgaaacaaccattaattttatggatgagttcaatttgataatggtgcataatttatttgagtgacattctcagattaagtttgcaaattttttgagaatgtttaaaatttatttatttttattagacattttctttatttacattttaaatatattttctagtttctcctctgaaaaccccctatccctttctacctcctcctgctcatcaacctactcactccaacttcctggccctggcagtcccctatactggggcatattaccttcacaggaccaagggcctctcctgccattgatgactcacaaggccatcctctgctacaaatgcatctagagtcatgagtcccaccatattttttctttgggtggtggtttagtcccagggagctctggagatactggttagttcatattgttgttcctcctatggggttgcaaaccccttcagctccctgagtactttctctagctccttcattggggaccctatgctcagtccaatggatggctgtgagtatccacttctgtatttgtcaggtactggcagagcctctcaggagtcagctataatgtctatagctttttcaatctctaaaactttttgttgggtctctgtgtggttcaggtatcagggtaattgtggcctcataaaaagaactaggaaattttctttgagtttctattttgcagaataatttgaggagatgttatattaactctttgaagatgaagttgaattctgtgctgaatctatctggccctgtgcttggttggttaggaaacttttaattcatgcttccatttcactaggggttatgggtttgcttaattttcttatttgatttgatttaatttgataatttaaaattaactttggtagattatataaatcaagaatttcttcaatttggtgtaggttttctagtttgggggagttcatgattctaaactgtatccttatgattctctggctttcttggtttcagttgtaattcccccttccttctgcaattgaataacttgcatcttctttatatatcttttagtttaattgtctaagtttttacaaatcttgttgattttctctaagaaccaatgcttgaattcattgtttatttgtattgtttgtttctatttccttcatttcagtcctggctttgagcatttcttttcatcatctttttgggtgctattctttctgttgttttagagctctcaggtatgccactaagttgatagtgtgagatcactccaactctttcaggtagctatgaaccaccttcactgtttcccataggttaaggtgagctctgttttcatttttattcaattataaaaaggtttatcatcttcttctggacttaacatcttgttttaatttttactctatcagtgagttgttcagtttccatcagtttgtgtactttgtgttttataggtctcccactctgatcagtggtagtcagagtgaatgtgggttattatttaaatactcttgtaactattgaggtttgctttgtatctgagtgtgtggtcaaatttggacaaattcctaagaccttattttttgaaggaaaatgcatatttttgttgtttggaggaaaaatcatgtaaatacctgttagatcattttcatgtatgatgtagtttaacttgagcatttctgtttagtttctgtctggataacctgactgttggcaaggggaaatattgaagtcagtcactatcactacaaaagaatcaatatgtgatgtgttatagtggtgttttctttaagactaggggtgctcttgtacttagtacataaatgtttagaattgcaatgtcctcttggtagctttttatcgcttggatgattatacaggtgcccttcagattttgtcacgtatttaaatagctacatctgctagcttctttaatccatttgcttggcatagtcttttcccaccctttcacactgaggtgatatatatccttcatggtgatatccttcatggtgatatccttcatggtgatatccttcatggtgaattatatttcttggatgcatcagaaagaaggtttcagtttgctaatccattagtttatgtcttttattggagaactgaaaccattaatgctggaagttaacaatgactgatgttttattgattcctagcatttttctttttgatttttgatgggtttttctttcgtctttctcttatgggattctttattccttacacactttatctcttcagactaaactttcctttctgtagatctaagtttatctgtatgatagatttatttagtgaccatacttgtctgcttgccattgcattgatggtcagtggaactcagatacaatcactaccccaaaggacaagcacatatgagtttctttcagaatgtaaaaccagtcctttctcctctaatacttagaaaatggaatttacaagttcactacaaaatcaaacaaacatgaaaaaattgtgacagacttgaaattagaaaacaaattagttttctatcctctttgaggcttgtctgcttcgtctacattccatctttttctattcactattagtacactttctttgcctccatttatgcacatatgtacttacatgcatatgcatattataggttggaatatgcctatgagaaagaatgtttcttgctatttcattctatgtttggattacattgcttaatattatgtatcctctatcacccatttccatgcaaatttcatgattccttttttttcttttgcctgttctcttagggcaatgactacgttgccttttctcataagcatgtcgccacctcaggctattgagtactccatccagctcagctgctgttgagctgttaatgatacatctgtccactacaaatcaccactgactacaagtatctgaatagtgaccatcttctgcacctataaaaatgatctttcaccatcatggtccatcctatggtccacactcttgaaaattgacttgagatatcttcttttcaataagcccccttactaaattctaacctctcaacttcggctcactcaaaaattatttcaaaaaaatttgaatatgcctggcatgtgggtcaaatgcagggttgttctgtgaatccctggagagatgcataagaaatgatttcaccaaatttatgtttttaaggaacaaactttctgtttaattgattgtgatatttcttactaattgttagtttgacatgtctatatttccctaacatcttgtcatatatcattggaataataatctatattctccttaattttttagttttggggatcatagctataacttcttcttagagtcatcaattttagctgtatttcaaatctttggctgatttgtgtttttcatactgattctagtagtggctatttttctctctattttgacccactggtggaacaaattccactgttcagcctattttctattagtattggtttcttatggcattctcctatgatctgaaagatacaaaaggatattttaatgtaaaattctgtgcttttcctgccctttaaagttcctgctggaaagtaattcagatgagttttccaaggcaagtctttttgtgttttactcttatggctctcattaccccttttcttctatttctccacattttagctataatgttgcagagaaattattacttgtttgtgcctatttggagctccaaatgccaaatgtacttaacattcaagcacctacatacaaacaaccttcaaatttgaggaaatttctggtacaatagtaagagtttctttatttgtttatttgtttgtttattctgccttaagtttatatcttggttccttcttgctcatagattcttaggtatcgattcatgattgctcttcagagcttctgagtgttgtgtccttgcttatttttctatgttgcccatgagtataccatcttttctcattggatttggtctttgataatattacaactgctgtatgaacttcattttggcttgataattgtatttctaacatttctgggttttcatttgttttcttcttatgtttgtattctctccttcatctttgttggggttactcattaaggttgcttattttctcatttctttgtcatctagatcttgatcaaacattcatttgtttccatttctttttctaagttatttttctggtattttactacttatatatatttgctttggtcattgggaagttataagtaggtagaggagttagattaccttgatttaaaaaaaatagcattatttccacattgtaatttatacatatttggggatgaggatctttcagttttgtttgtttattttcatttgacttaatgtaagccttttactatggtggcttcctttggggtttgacctggcacagaggcctgttaaaatagttatcttaaaaatccttctcaaacattgatactaatatttaggtctctgtggttatatgccttctgaaccagttgagatgtggtgtggacaattccttacaatccaggatttccctatatctctctggtcctctgagagtatatgcatcagttaggctaaatagcatcagctagatgtgcatgctaaatagctctgatagatcctacctgcctttgtccaagtcttcattgatccagcaccctgatcatattcacacacaggtgctctctatcatcttaccagacatggggtacagctccacttgctatatctgttcatggttttcttcattgacacacttccttctcaagcagatgattgtctgtgaatatgagtccaagtcacaactagttagtttcctgacaatcaggatagggtttttttttgttgttgttgttgttttttttttgtttgtttgtttgttttttgtttttttgtttttttttcctagccattagtggtgtggaagccttcagggtttggggaaataaaaaatcagaatcttgtgctgaaatgatggatcagtaggtaaagcccttatgcttagatttgttttcttttgttgtcattaaataccctgatggaagtaacttatgggtaaaagtatttatttgaatcacagtctcaggttatggtccattactatggggaattcatgacagcagggacttgaagaagttagtcacagcatacccacagtaaaaaacagaaaacaatgtattaatgtgtgtgtgtgtgtgtgtgtgtgtgtgtgtgtgtgtgtgtgtgtgtgtgtgttggtgtccnnnnnnnnnnnnnnnnnnnntgttggtgtccctggttgtgggtgaaccttcccatatcagtcaatgtaatgaagacacagataagtcttcaggccatcctaatctagaagaccattcattgagattactacttgttgactactaaaatgaatcatcacactgtaaacatgagaactggagttttaacctctacagctcacaactcacatgaaagttaggtgcaatggcatgtgcctgcaatcctagagcttctacagtgaatttgaaacaagaggcaggagaagctcacatcaggccagagaacctgattaacaggttaactgcaggaggcaatgtctcaaacaagttagaaattttgaagtgacagcagatattgtcctctgatgttcacacatgtaccatgtgctctatggcatacaaataccttactaatatacaataacacacacacaaatatatatatatatatatatatatatatatatatatatatatacacacacacacatacagacacacacacacacacacacacacacacacacacacacacacacatacacattcaatgttttatcactggttctcccagctgaggtattgagtatatcctaggaaatataggaaacccctcctccaaaataagtgtacacaggcctctcctcgtaaacattaatttttctcatagtcctgataggaaaatttcctgctgttttcttgtcactcctcatgtgagcccactgcttcttttacaaatctagatatttatctggatttagttatttcttgttttcagtgatggcaaaatatttttctttagttgtcttgctggtcaatttgaacatttacatctattttactttagatgggcttagatataggatgctgttacatgtctccaaaccaccatttctttaatgttttgagaataaaacatgttctgttcagatgtccatcttggtgatgacacaaattagaatgatgcactactttttttttaatatttctattcttattaatttatgtgcatctatctgtatctatgttccatggacaaatgcataaacatgcctgaagagattaggaaaaagtgttcaattccctagagttagagttacaggcatttgtgagttgcctgattttagtgataggatgaaatcttgggtctcctgcaagaaaaataagttgtatgtactagtggtccttctttctctaactctggcagctaattctcttttttccagatttccatagattgtttattcataatgaaaatatgaatttaaaactgattaattttaatcttttaaaaaggaagacaggcagtataaggaattggttacgtcaaagatttctcctgttctgttacaggctcccttgtacttagccaagtacagtttttatttgtttgtttctgattttttgtttgttagtttgttctttaacttttaagagagtttatgttgttaattttttcatatatttaatttttaagataattggagttttactccttatttttccggggatggatactctcttttggccattaaaataaattttagttaagtcatttggtttcttatgtcttttgtttagcacaaagcaggactttcactacacaaagagtacattgaatatttgtgtgtaatacaactgacctcctactctaagttcatgacttgtgcttttagtcatttttaaaaaatctttaatatttccttacaacccagtcactattgccctcctattccactctccaaaagttcacattccattcctcctccactgtctccaagaggatgacccaacccccccacacaccttgctaggcctccccactccctggggcctcaagtctctcaagggttaggagcttctcctctctcggaggccagaccagacagtcctcccctctatatgtgtcaggggcctggaaacagccattgtatgatgactggttgatggctcagtgtcagagagatcttggggatccagattccttgagatagctggtcttcccttgcagttacccttctcaacctcttccagtcggtccctcaattcaattacaggggtcccctacttcagaccattggttgtgtgcaagtatctgcctctgtctcagtaaactgcttattgggtctctaggatgagagccatgctaggctcctgcctgaaagcataccatagcatcagtaataatgtcagaccctggaaccttccctgaggtggggccatattttggccagtcactggactttcttctcaccctattccccattctcctctctatttttgttccagtagttctctgagacaggaacaaccccagatcagaatttctgactgtaggataattcttgagaaaaaaaaatatgtgatggatgaggaaatggctaaggaagtgaggtagttgccatgcctatttaattttggtttttggtcagatcctccagaaccatggaaatacgtgtcctgtaatttcagcatccccatgagtagaaaaagggaggaaaaagagacatcttgaacttttggtgtatgcagtggtatatgcagtggtgaataagagaacctatatcaaacagtcaatacctgaagctgtcctctgtcctctgtgtgtacaccgtggcatgtgtttgggtgccaacttgtttctttctgtgtacttcctgtctgttcctctcccacatatccaagttccatacatatgaatatattatattgtattagtatagtaaatatttccaaataaaataaactttgcactcttccaaaaaaaaaaaaaaaaactaacaacaacaaaaaaaaaaccaaccaaacaaaaaaaccaaaaaacaaacctgagttgattctgaacatggtttatgaaaacagcatggtcatcatcgagaggtagaaagatattgatgacactgatgtgtagtttgaaaacctctccagagatttatttgctaagaccataacgtttgtacagagaattttagagtttgaacatttcttcctttgaacatttcttcttgaatcacagagtaacaattaacttttaaactattttggatgccactgccaaaacatcttatttgaggcatctttttaacttagtgtcagctctcagaacttgaaataaacataaatacagcaattatccttgtattataaaatattacattcttaatggtagcaattattttcagtgacaaaatttcaaatgcgtggtattttacttgtctttgataataaatagtcaatgctttgtgacacatgaataacacactacttagaatatatctaaataggaaataagaaaatgagccccattaattttaaaggtttttttttcagtgactttgcttccatgtgggctccagatttctatatgttgcatacttcgaatcatttctcaaatagttatatctcatgggtattttgcctgcatttgtatatgcgtaccatgtgtgaacctggtggccgtagagacctgaaaagtgcatcagttccacagaaagtggagttacaagatggtaagatggtcgtgagccaccataaggtgtggtacagttaaaggcagcctgttttggttgagcgaggcttgctcctgagagccagtagaaaactctacaagggacagaacagtgagtcacattcgcagagacaggtgactgacaccacagagacccccaactccataattctgtgactatcagtcacgcagacaaagccccaagctcctggcattctagctagactccaccctcacagttacctgtatgctcctccccacagctaccctgcaactgcaagatcacccagcccactataaagggggctacttggcccctcgtctctctcttaagctctcgactttcctactctcatctatagctctcctttccccctcccttccctcctttctctccacgtggccatggctggcctctctcttccttttccttcctctctttctctctgccttcctacaaaaatgctctaaaaccatagacagtctctgcttatcaaggccctccaggcttgaatgatggaataggatttctcctatgtctaacctcctctcttgaaggccttcctgcactccagccacgaactggaccaaagactctcactcgtgtgggaaccatcctgcactcctctgcccatgcctactgctcccttctgtcctgggatgccaaactgccctccagggcccccattttgttctcagcttttccatggtatccagtggtttctgagatgtcctagactgagaacctgttatatctggactccatgaggcccagagactgcccctctccacctccccccatgaactacgtccatagcttcacacagccagacacccacccagggccctgtggagagtgcgtagcagtcctccatatccactgacccagagcacaggaactctagagagactcgggttctctcccaccccctttattcctccacactcgctgcctgtcaataagggtgataagaatagaacccagctatgctgaaaagcatccaggccagcattccttagcatctctagaggaactgttgaaacacacacatatacatgcatgcacgcacgcacgcacgcacgcacacacacacacacacacacacacacacagtatggcatgaagaagacttgacacatttgagttttctttgatactggatttcccttatggaagcttcaaaattcataaacctatcctgaaaatgtgttactagttccagcaatgcatcttcaggggactaaatgttctgtgtttccagccatcactcaagcaacactggaggtaaaagaagctgttctcagcacctgtgaactttttactcctttcctatctgtttgacatctttctgcaatggaaaaaaatactctatttgtagttttgctctttctccttagcagttgttgtatataaagaaaaatagatactcagagataaggtgtgcctgtgaaaatgagtgctttgttggtagtgatgtaattattatcattattctcatttactctaaaatacattcattacttcttgtcttatttttgctgagaaaactaatattcactttttttgggcctatgaagagtatgcatttcttgttgtagaattagaaataacttttcaaaaaaatgtcttatttaccaaaatatcacataacccaagattgccaggacaaacatattttgaaaatgtaaaatgtgttttcagaaaacacatgtggcattgccaggaactaaaatagaacacaaaccgtttctagaaaaattccaattggaaaagacagagctttttcagaagtatcccatgacagaaattctagtgactggaccaaacaatagtcccgtttgttagcttatatagctttgaaaatgtgaatagagtgtggtgatactgatcttggaatggtggattcatctctctctagggtccttcacctgagtgctctgctactagttaatagccaatataacccactattcacacagtccactaaatccaaatatatttgtactgagagaagagaatacttggtaatgttgatcaatctttctgtgtggcatgcagcacagtctacagccccatccagtgaactgcagctgcttttcttgtccttggtatgtttgtcataaatagtattagaaaaaaccaaatcttctaaatgtgaacattacatttttatcttaatgaacatatggttaataacagattggtgcttttaaaatattgttttatcataggatacttggagaatatgatcagtctgtgaaaagagaatactttgaataagtatgtaaagccacagtttcatataatgctaggcactgactgccctgaagctctttttggatccacagcttctaaactctggtaatgggagtcttttcttttaagaatcacattttatagtgaaagagatttagagatgattagaagttcaaaaacatgttttttttattagatatctactttatttacattttacatgttacaacctttcccagtttcccctctgaaaatccaatagcccttctccccctccccctgctccccaacccaccaatacccaattcctggccctgttattcccttatataggggcatagaaccttcacaggaccaagaccttctccttgactgactaggccattctcagctgcatatgcagctagagtcatgagtcccatcatacgttttctttgattggtggtttaatcccagagaactctgggggtactggttaattcatattgttgttcctcctatggggctgtaaaaccccttcagctccttgggtcctttctctagctccttcactggggagcctgtgctcagtccaatggatggctgtgagcatccacttctgtatttgtcaggcattggcagagcctctcaggagacagctttattaggctcctcatagctagatcttgttggcatccacaatagtgtctgggtttgttggttgtttataggatggatctccagctgggacggtctctgaatcgtcattccttcagtttctgttatgaactttgtccctgtaactccttccatgggtattttcttcacccttctaagaaggatcaaagtatccacactttggtcttccttcttcttgagtttcatgtgttttgcaaattgtatcttgtgtaatcttagcttctgggctaatatccacttatcagtaaatgcatatcatgtgtgttctcttgtgattgagttacctctcttaggattatatcctccagattcatccatttgtctgagaatttcataaatttattgtttttttaatatctgtgtagtactccattgtgtaagtgtaccatattttctgtattgattcctctgttgaggtgcatctgggtcctttctagcttctggctattataaataaggctgctatgaacatagtggagcatgtgtccttattataatttgggacatcttctgggtatatgcacaggagtggtattgctggttatattgctggctaatatccaacatattcaaagaactcaagaagttagactccagaaaaccaaataaccctattaaaaataaggtacagaactaaacaaagaattctcaactgaggaatactgaatggctgagaagcacctaaaaatattggcaatatccttagtcatcaggaaaatgcaaatcaaaacaaccctgagattccacatcacaccagtcagaatggctaagataaaaatctcaggtgacagcagatgctggcaaggatgtggagaaagaggaacactcctccattactggtgggattgctggtacaaccactctggaaatcagcttggcagttcctcagaaaattggacatagtactaccagaaaagcatgttttcattaacaatatctagtactgccagtgagatggttcaatgaataaaaatgcttgccatcaaccccaatgacatgcgttagatttcccaaataccatatggtggaataagaaagccaactcctgtgaattgtctgtgctctgacctctagaggtacactgtggcttacaaatgtccattcaaaagcaaaaattatagataaaataagagagaaggggggaagggatccaacaatgaaagtgtctaccattttttatcccttctaacaaagttagagtgctgtgtttctttacatctttatttacccttctttggcatagggtaccaatttttgattgtagtatttctgcctgtttttgcaaatataatcttagtagaatacacacacacacacacacacacacacacacacacacacacacacaaacacgtcattctaatcattcttggatgttttcacaataacatagagggtcaaacagcaaagaaacatcactcacagagcctgaaactcttacctggccctgtagagaaaaaatttgccaagccttgcattagcaaatgaaagattcacacccttattttattaccaatcaatttccatatctcatgtacttagcattaaacttgactctcattatgtatggatgggatgattgaaatcaatttgtttgactacatctgtgaatttgtgattggtgttaactttctatttattcattcactcatattcactcaatgtgtttattaaatattcatttattcaatgccttcattaaagtcttagtatgtgtcagtggctgtgtaaggctctggagataatgcaagaaggctgcatgagactcctgtcttaactgagcctatatttggaaatactgttgtctataggaagagaataaaatgtctggggtatagaatggtgaggaatgtctgagcacacatgtgaatgaaggggggcctaggagagaatgatagaatgatagttcctgatgtgtgaatatttcgtgagttacaaaaatgtttttcaaagaacactgggggctggggatgtaactacttgctgcagtgtttgattattgtgtatgagaactctgagatccatcctctgcactatgcacattggatgtgggcccatggcacataaattaggcaggttggcacacatctgtaatctcagcactcagaggttaaagctggacgatctgtacatgggactcattctctgtcacagcaaattctagtccatcttgagcaacatggtactcaatctcaacaaagccctgtatagtagcagccctgtggatgaacaactgattgccatttccaaagcctttctcggtgtttaatatgcaaaatgagaaatatcagtgtctacagggttttctacctgaccatcccatctcatagtttgatgaagtgcattacagagcagtgctatgaggttaaaacaaatgatgtggaactttgttagccaagacaatcaagtaactgattcataacttcttgaaactgaatgccccacacttccagctgcacggtgctaggtgacctattaggtcctgaaagtttcccttctgtagatagatgctaggtctgtaattagtatgataatgcttcattcaaagaatctttgaagtcgcttttcttttattaagaactttcctttcagatgtggcttttgaaagcaccttcaagattatggagaagaaagttcaaggggagataatataatagatattcttccttgggctctcaaacttgtgaaaagattccttcctttttgttaaactgacttagatgaatttttcaaagtggggtgttttggtgctcgaaggctagcagcagcctttgatcttcttccgattctttccaacatcttccctctttgaccactgcacagctggctaacagtctctgcaatattatcataattacctgtggatgtatttttgtcagcctttcttggttagtttatattgaatgtaaacttgtcaggacctagaaccacctaagaaaggaacctctgaacacatctgtgaggagcccttttgatctgttaattaacatatgaggacccaccctaaatacgagcagtaccatcccatgggctgggatccaaaaatgaataaaaaggaaaaagtgagctaaatgccatcatccatttctctctgtttcttgactctatgtgtaacatgagcagctgttttaccctattgctaccatgccttcccgaccacaatggactataccctcaaattaggagccaaaataaagcctttctccttaagttgttttctgtaggcaatttttcgcagcatgttctaaaagtaatcaagactcctccaagaattaaaagtcagcatgatggaggcaaatttcagcaaaatgggaggcttggatatgtttttagtacatagtcagttatgatcgcatccctcagggcagtgcacaaacagtcattttaattttagacaatgaaaattcaagatccatttcctcttgttcccatttgacacctgttaactttctaagaatcaccctcaccaggaactcaactttttttaaaatattttttattattacgtattttcctaaattacatttagaatgctatcccaaaagtcccccataaccccccccaccacttccctaaccacccattcccattttttggccctggcattcccctgtactggggcatataaagtttgcctgtccaatgggcctctctttccaatgatggccgactaggccatcttttgttacatatgcagctagagtcaagagctccagggtactggttagttcataatgttgttccacctatagggttgcagatccctttagctcctcaggtactttctctagctcctccattgggggccctgtgatccatccaatagctgactgtgagcatccacttctgtgtttgctaggccccggcatagtctcacaagagacagctatatcagggtcctttcagccaatgcttgctagtgtatgcaatggtgtcatcgtttgaaggctaatgatgggatggatccctggatatggcagtctctagatggtccatccttttgtctcagctccaaactttgtctctgtacctccttccatgggtgttttgttttcacttctaaggggcaaagggtccacactttggtcttcattcttcttcagtttcatgtgttttgcaaattgtatcttatatctcgggtatactaagtttctgggctaaagtgctcagcatccttaatcatcagggaaatgcaaatcaaaacaaccctgagattccatctcacaccagtcagaatggctaagatcaaaaattcaggtgacagcagatgctggtgaggatgtggagaaagaggaacactcctccattgttggtgagattgcaagcttgtacaaccactctggaaattagtctggccgttcctcagaaaattggacatagtactaccggaggatcccgcaatacctctcctgggcatatatccaaaagatgtcccaactggtaagaagggcacatgctccactatgctcatagcagccttatttataatagccagaagctggaaagaacccagatgtccctcaacagaggaatggatacaaaaaaatgtggtacatttacacaatggagtactactcagctattaaaaagaatgaatttatgaaattcctaggcaaatggatggacctggagggcatcatcctgagtgaggtaacacaatcacaaaaggagctcaagtttcaaagtgataaaatcagcaaagttagtacagcnnnnnnnnnnnnnnnnnnnnnnnnnnnnnnnnnnnnnnnnnnnnnnnnnnnnnnnnnnnnnnnnnnnnnnnnnnnnnnnnnnnnnnnnnnnnnnnnnnnnnnnnnnnnnnnnnnnnnnnnnnnnnnnnnnnnnnnnnnnnnnnnnnnnnnnnnnnnnnnnnnnnnnnnnnnnnnnnnnnnnnnnnnnnnnnnnnnnnnnnnnnnnnnnnnnnnnnnnnnnnnnnnnnnnnnnnnnnnnnnnnnnnnnnnnnnnnnnnnnnnnnnnnnnnnnnnnnnnnnnnnnnnnnnnnnnnnnnnnnnnnnnnnnnnnnnnnnnnnnnnnnnnnnnnnnnnnnnnnnnnnnnnnnnnnnnnnnnnnnnnnnnnnnnnnnnnnnnnnnnnnnnnnnnnnnnnnnnnnnnnnnnnnnnnnnnnnnnnnnnnnnnnnnnnnnnnnnnnnnnnnnnnnnnnnnnnnnnnnnnnnnnnnnnnnnnnnnnnnnnnnnnnnnnnnnnnnnnnnnnnnnnnnnnnnnnnnnnnnnnnnnnnnnnnnnnnnnnnnnnnnnnnnnnnnnnnnnnnnnnnnnnnnnnnnnnnnnnnnnnnnnnnnnnnnnnnnnnnnnnnnnnnnnnnnnnnnnnnnnnnnnnnnnnnnnnnnnnnnnnnnnnnnnnnnnnnnnnnnnnnnnnnnnnnnnnnnnnnnnnnnnnnnnnnnnnnnnnnnnnnnnnnnnnnnnnnnnnnnnnnnnnnnnnnnnnnnnnnnnnnnnnnnnnnnnnnnnnnnnnnnnnnnnnnnnnnnnnnnnnnnnnnnnnnnnnnnnnnnnnnnnnnnnnnnnnnnnnnnnnnnnnnnnnnnnnnnnnnnnnnnnnnnnnnnnnnnnnnnnnnnnnnnnnnnnnnnnnnnnnnnnnnnnnnnnnnnnnnnnnnnnnnnnnnnnnnnnnnnnnnnnnnnnnnnnnnnnnnnnnnnnnnnnnnnnnnnnnnnnnnnnnnnnnnnnnnnnnnnnnnnnnnnnnnnnnnnnnnnnnnnnnnnnnnnnnnnnnnnnnnnnnnnnnnnnnnnnnnnnnnnnnnnnnnnnnnnnnnnnnnnnnnnnnnnnnnnnnnnnnnnnnnnnnnnnnnnnnnnnnnnnnnnnnnnnnnnnncacacaagcttgagcgtacacacacgtgcgatgcttatgaagtacttttgtatgagcatttgcaaaatttggaatgtaagttgtttgttagagggtcttatttaatttatatgttttctactcaggtatggcaatatagccatattttctggacaagagcatgctgaaatatgcttgtgcaatttctttatgccacttgacaaaacatcattatgtgtgcagtattcaaacagagaatgtaaacagaagatatgggaaaatacttagatttaaaaaaatggtttttcttagttatgtttgtgtggtctttcaacctgtcttcaggtgaatttcttttttttttttttaagatttatttatttattatatgtaagtacactgtagctgtcctcagacactccagtcagatctccttacggatggttgtgagccacaatgtggttgctgggatttgaactcctgacctttggaagagcagtcgggtgctcttacccgctgagccatctcaccagccctaggtgaatttcttaaagcaaacaaaattgtaactacaatttaactgactatgggaaatcatttctttttaaaacaggttacatttaagttattatttatgtgtatgtgtacttaagaatgggaatgtacatatgaatatagatgctccacattgaagtnnnnnnnnnnnnnnnnnnnnnnnnnnnnnnnnnnnnnnnnnnnnnnnnnnnnnnnnnnnnnnnnnnnnnnnnnnnnnnnnnnnnnnnnnnnnnnnnnnnnnnnnnnnnnnnnnnnnnnnnnnnnnnnnnnnnnnnnnnnnnnnnnnnnnnnnnnnnnnnnnnnnnnnnnnnnnnnnnnnnnnnnnnnnnattttatatcctaaaaattgagtttcaggcaggtgtgagtgatcctacataattgcagggaactgagttctccaagagtagaaagtgtttttaaaagctaaacaatctcttcaatgctataaatattacttcttattgagaaatagcataaattgggaaggaatgtctgtccacatgccttatcataatataattgcagaatcaactggaaaatgacatcttaaaaagattttgaagaaaagacaggctacagagtctgaaccatttaaacagatcttatagcaagcaaaatgagatgctcaagtgtaactggacagtgtctgccaggagaggttcccataccttaaaaatgtaaatcaagttaaaccaaaaaaaaaaaaaatagtcaacaattgaaatacattctatacttcaatgaaaaccattaatattattaatatgtgctaataaagttaacgaaaaatcactaaagctagaacacagaaatgataccacaaagaaattctgggatttaagaagaaattatgaactgccatgttttgactcctttttcagtctgcatttctaaataaaaattataattaattcacaacttagagagtggtataatataaataaatagttatatatcattataagaactgaaaatattgagagtaggaaaataatttcccaaagctgttatggaaaatacaatattaccacagcatcatcatagctcagagtattatcaaaatgaataggtatattagtaggttagaggataaaataggtttggtatatttttagaaaatgtataactgaattatttttaagattgttaaattcagttaggataatagccaaaaatataaacctgaagtagaattttcaaagacatgggagaaaacaggatgagactgaattgagcatttaaaatttaaaaattccactgtagatacaataaaatggagtgacacaaacatttgacataatgaagattgtggacctaaggagaatcactggaatttattgttagagtaatatccacaaagttcacaagagactcagaacttccagatacaaataaagattttcacaggactggagtgatggctccgtggctaagagtgcttgatgcataattgtgaaagctggactttagatatcagcattcacaaaacatacaggatgttccaaaggtgtctataacttcatctctggaagagcagaggttctccacccttatatgatcccagcaaagacaggcatacaaccatacatgtatacatgtatgtgcagacaggcaaaagcacacagatagatatgctcacaaaacttaactaagaaattaaatgcaactaaataaaggtttttcttatggaaagtaatactagtttcacagcataactccactggtgagtgttcaaaatgaatttatctcctagaattaaactaccccttccttttaatatgtgcatgtgtgtgttcatgttcatgggggaatctacatgtgtatatgtgtgtgcatgttcatgatggtgtctacatgtgtgtacttatgcgggcaagtatgtgactagagcacagaaatcagtattggtgttgtccctcagatgctgtccctctgtttgtttgtttgtttgttgaggtaaagtttctcatgtgttgagctgatcaagtaagttaagctgtctcaacaagtagacacaggaacccacctgtcttcacctctgaagaattataattacaaatagctggcactatgtccagatttttcatatttgctttgagggttgaagtccaggtccccatactaatgtgacaagcacttttctcactaagctttctccttagttcccgaaattacccttttcttgaagggagaaaggtctatgcacagttttcactgattgtcatgaatagtataacactgaacacgaaaatggtgtggagtctaaccattctgattatcagtaggttcccgtctttaggtgacattatcctgccaatatctgaacaatgctcaagttcagagcattgaatcatgtgacaaaggtacccaccacaggaaatgatgatcagagagagctgactacataaaaggtctttttttaaaaaaagaaaatctatatttatttaatctctagatctaacaagaaagacaaattgtaagacaaactatgaaagaaaaaaatatgaactgtaagggttggtatttaattgaaaatattttaatttaaagctcactttacatattgagagatttatacgtgtataagatgttttatacatgtataaatatatcatgctcatcccccctttctctctccaacttttcccatacctccccatgctctccatgtgtgtgtgtgtgtgtgtgtgtcgtgtgagtgtgtgtgtgtgtgtgtgtgtgtgtgtgtgtgtgtgtgtgttagcccattgacttgaattagagatggtcataggctcttgagattgtggttaagtgctggagcataggcaactattagaagccactccccctaaaattattgaccctcccttctgcaacagccattaactaccaatatctccctcactagtagtgggctttctggttctcccacatccatgctggttccattgactgactggcttgaccttgttctgaattcatgaatgatagactcatgttagttttaattttaaaagacagatgaaaacctgagcacacataaatcttcagatacaaaaatcagacttcctctgagtaatgcctagacactttctacacagacacagtttcatgtacatctgtagttttgcccaaattttaacaggtaccactttctgtttctatggaaagggatttgaaatatatccactgattgtacatttcttgttcagtcacagaatatagaagtaatgttcacattcatgaaaactggctttgaaggattgttaacaggtgatcccttctgtgatgttacatctggttgcagtctccaaggatgacctatatactttggtgaggggcaattgtggactaagagggcttgctcagttagcaatgataatctctccttctgtacatttcagtcaatccctcatctttgttgttcagtcatccttagaatttatctctaagggcacccccatgtccataaaccataaacttccaggggcaaggatttggttttatatgatattgtatctggaaacctaggataaaatagtagagacacgattcataactaccatgtcaaaattgattcccagaacatgaataggaattcctgatggatgctgtgatttttaccctaggccactgagatatcataccaaaaacctaaatgggcttggtctcatatgtgatattgactgaagtctctcttctagacttaaaatgtaaagagttcggagagttgagatatctcagtcaataaagcacttatctaacttccaagcaagaagacctgagtcccataccaaaagccttgaaagatccagatttagtgctgtgtgatcataatccaatgacagatcttgcatgtgccctggctcaccagcaagaacgatactgcaacaggatccttctgcacacgtttattgggagagcattgactgcataggcgaaagaccctgagcccagaaatggtgctgcttatataggcctaggagtgacgtgcccatacctgattggttatgctaccagtacctcattaatatgcgtccggccaggcagtgactcggcaaaaacctcttatgcacatgcgcacattggttgtttacccataatcatgggcggtggccagtggtagccagcgccatcttgtaatggtgtttgcggcttcccacagacagagaggagggacaggaaagtaaacccctgggattcactggccaactagcttggcctgccttgatttctatgaaagactttgtctcaaacaaaatcgtagtggctcctgcagaatgacaaacaaggccctctgatctctacatgcacatgttcatgaacacctgaatacatacatatgttcccttccaaacacaaactcaggtacacaaatacacacatatggtgcatgcatgcacacactcacatgcatacacatgtacccatatacacataaataaacatgtgtacattcatataccaatatttacaaacactcatacacacatatacaaacacacatatacactcatacatacatactcaaacacacatatacacacacaaatatacactcatactcatacacataaacacacacatacatacacatacacacaaattgttcagagttaagagttgaatagtttcaaagatgctcatagtaactatggacacagggttggttacaggaactgggccccacacaagtgtgggaacaccaggcagagtgacagtgagcagggctgctcaagtgactatagcaggaagtgatacctcatttgtctgagcactggctctggctgtcatgtcaggctcagatcaagccccctagagagggtggtttaaatcttcactgaaagcagaagctagaatgaagcaatggatatctgaagggaaagtttacaagactagtagaacagatcttgtggtattttagagaacatccacttcatgtggcaaagagattatttccttcttgtatcgcctgaatgactgggcctatattttaaattcgatccttttggttccatgtgactggcagtaactaccttccaacttgctcaattcctcaagtatttactcagaagatgtcactgagatcctttggtggaaggaaaagtcatgataatctccagcaaatatatgcaaatatctttaaaaaacgtttagggccaagattttccagaacaagaaggttagtagcaaatgaaggaggggggatggagaatgggaggacaaagtcttgaagacactcccaacagtaataggaacagccttgtctctgctttacccgttctcaagtccaggttctcctccatatctttatctaccttcaaccctttcctacctcccttcccctcccttccctgtctcacatacatattcactgttcatatgcaaatttcttctatctctttttctccctcagcaacattctctcactattaaaccctttactatatcccctaccctccctctctgtctcacacatgtactcactgtatatatgcaggtgtctgcgtgtatagatgatatagctatagcttgcataaataaatataaatgcaatataaatatagacagtaccaataatgactcaaatattgatgatggtacagagagacatcttggtagagacttatgggtatgggtatgggtatgggtatgggtatgggtatgggtatgggtatgggtatgggtatgggtatgggtatgggtatgggtatgggtatgggtatgggtatgggtatggatatggtatagtgtagatagatatatgtcagtatgctctgttttatcatttttatacagaattccagtttaggtaaattaatgattattcatgtagagtatagtattaacaaaaggccccatatttgcccacgtaattatttggttatttctattgaatgaattggctctgtctctctttactgaaaagctatcgagagattattactgtggcttaagtgttgagtactgcctgattcatttggaatgtgttaaacctaagtatgtcctatcaaagtaacccaactctgcttatcttatgagtaagagttagccttagccctaatagtgaaatcctttggaaaggaacaaataaaattggaaattgcaagtgtgatcccaatactatttgatggtattcatgatggtctgatttacaaaacttaggggaatccatgcaaggcattgctgtagctcaaagtcgtgttcaatgcaagtttccttcttagttactcaagcaactagtctgtggaataggctactctagctgcagtacaaagattaaataagcatgttattatgttttatttttaagaccaaaactaataaccttaaaaattagagagtaaatctaaggatttgggggattctctgcacaaattgtgatggagtccatattctgtcctgagattagtaaatggtattttaataagagcagaatataaaatgacaaggagaaatgtgtctagctcagcactgagtgacactcagggaacagaatatatctgaaggatcaacagaattattttcccagaccttcttaggttaaaatatttgttctttagcattatttttaactgtcaggtgtgcctggattcttcttattattggaaagcttaacacacaattcctggctctgaccaaacagactgtgacttgctgtattcctgggggttcatgtttggtaagttatccattaacttgcacagtgtgtgttactgcttcgccatagcctcagatggatggaccagtggcttaaggtttttttctattgtagttagttgaggaaaagccaagctatcttctgatcttaccaagtttgtgttctggcagaaagtatctgcaataggagcctcttggctatgtcttaatgggatctgaggaggtgacacaaagacaggacattttctttgcatggagaaggcctgaatattgatcccctgctctacaaataaagcagaaaaggaaagagacatggagggactcaggaagagagggatggaaagactgaaagaaaaaagagagagataaagcaaaacagaagagacaggagacacaacaaagagaacttgagttcttttatgagccactaaagaattctaatccttggctcacactgcattccaactttaccattctattagaagcacacatagctgttgaatattcatgaaacaaacatttcttttaattttactaatcattgatcagaaatgttacaatggggagtagtttcagtcagtgaagacatgccttgacttgaagagggttgtatacgttaagtgaaggtgtaatcattggtattgaagtagacagagttgaagtctgtgttttctgaaacagaaatgagccagagaaatgcccatatctgagagtgccaatatctgttcttgaagacagtcgtactagggacagggttcacaggctctctagtgctgtgatggatcatgagaagtgttccacttggtggaatgatacaatggtatcagaatctatctacaagatgctctataagagaacaggtttaggctaagagaccttaagtcatattactacttcaacaaatcaccccaaatctattttcagtgcagagaaaatctcttatgatagttctggagcaagagaatttcaaattcaagccatgaagaacaattagaatagtgagattttcttgtgttaatcctcacaaaccaggaggcagaaagcaagatagcaatgtatcagaaggcagtgagaagcatccttgcactgaagcatcattccacagactacctctcaacattggcagcgatatcatgaacaaccaaatcttggaggaagtgaagtcagtgtgacctgtgcatggaacagaaatacttaatccacagaagggtgtggtaaatcaagtgaagattcaaccctcttacactattgtcggaagtgggtgcatattttatgctggtaattttagttcatatattttccaggcagagcatctgtcttgaagaagagagtaaaaccctttgatcatctatgagagaaggaaaataagccactaggacaggaattaagaactgctaatgattatttcaaactactattttctataagaaacctgtcaggggaaagacaattgttgagtcacatgttttgtttgtttgtttgtttgtttgttattttgtatttttgctttttaggactagagaaggtgttggtgttggtgttggtgttggtgttggtgttggtgttggtgttggttttggtgagggcatagagcagtaaacattccaaatttcaaacttagatttgacaggaggaattatatagtgttttcttaaaaagtgatgaaagaataaatttcagatgtactcaccagaaaaagcagctgttataagctaggagaggtgactgcactatttattaacacagtttcagataattgcactaagatctcaaactacagccattcccttcttcaagttacttccacatgcctttctgtcatgtttagctgatcgatgtgcctatgcacaatatgagattttgcttttatactcaaagcatgatataatagatcattaatacaagttttcttattcataaaatattattattcaagtaacaaatattattttcttctttttgacaactggatcttatatagctcaagtgtgctcatactgactactgtcctgcctcagcttgaaaagagctacaattactgatatttacttaaacctccaatgggatcaatattattatagtcatcttactcatgaagagtttcaggtttatagagtggtttttaaaacctggattctaggttatagaattaagtttgcttgatgagcactttatcaaatgggccatgccccagccctagcaataacttattaatgacaggcaggaatgcatctttcttggtgaaattggggaaccaatattcagaaatgcccctgacacctatgccaaatgtccaaattaaatgattctagctactcttctgtgacttttgctgaatacatcaacaatcacaagagttagcatacattgatgggattaagtgacagtgaacaatgcaagcaatgtcagagtttattaaatagaacattgtattctattggcaatattgagttcacagaatgcattagaagcaagtcaaatgctcactgtatttgtatacttttaaaagtatgtgtttagtatttttaactatgcatacttgggagagtacacatatgagtactggtaggttccttcaatgttcagtagagctgaagtcacaggtgctggcatgtatcagatttgggcagtgacaactggccttgggtcctctggaaaagtgcaagtgctttcaaccattgatccatatatcaagctcccatcttcaagttttttggattaatttttattcttccttcaacatgctgtatgtataatatgatgattttagggctttaatggtcaatatctcattaatactttattattttgcatgacattttaagataagaattttctcttagggaagctggaggattagcttggttctgctttaatacagggaaagaaaagaaatttagttaaataatatatttctgtatcgtgtatgctttgtactgttttctctgtgtgtgtgcctctgtgtctctgtctgtctgtctgtctgtctgtctgtctgtctgtctctctctctctctctctgtgtgtgtgtgtgtgtgtgtgtgtgtgtgtgtgtgtgtgtgtgtgtgtgtgtgtgtgtgtgtgtgtgtgatgtaagtacaggttcttgtggaggcaagaagagggaggcagataacttggagctagaattccagaattttgtaagctatgtgtgctaggacctgaacttgaatcatttgaagagcagtaaatactcttatcactaaatcacttcttcagcccattgatatgctgaatttgtattctgtactctgtaactagaataggtgctttctcaaattcagagtacacaattgtatatttttcattctaaattatatagtaaacaagaaatatgttttcatccttccttcctgcttttttttattacagctgattcttactcagacactcaacattcaaagtacatttaatgtctatcataagcactgggtgtttcaaagttcactcagaaatagtacattctgagctttggaggtactggttagttcatattgttgttccacctatagggttgcagatcccttcagctccttgggtacttttctagctcctccattgggggccctgtgttccatccaatagctgactgtgagcatccacttctgtatttgccaggtactggcaaagcctcacaagagacagctaaccagtacccccagagcttgtgtctctatttgcatatgtagcagaagatggcctagtaggccatctttgggaagagaggccccttggtattgcaaactttatatgtcccagtacagtggaacgccacagccaagaagtgggagtgggtgggtaggggagtcggggggaggggagagtgtatgggggacttttggaatagcattggaaatgtgaatgaagaaaatacctaattaaaaaaaaaagaaatagcacattccccttcttcaggaccgagctaagacatggtggctgttgttcacagtgtgttcagtgtgagttcataaagtttgtggctctgttggcagaaaaaaaaaaagacttgaaagcaatgtgtgatattcttcaaaaatagcaataatgtgtttgtacagatagttttgtactataaataatgctcagacatcataaaaataccctattgactaaaagcaattgtccaaattgtgagttcgatcactgtaatccatatgatgaaaggagagactcagctcttagaagttatccacttacctccacagatattaggtgtcacatttatgtttatatgaatacatacacataataataaatgaataagtaaacaaatataattaaaaatttgacatacatgttggagaaatcgctaggcagttaagagtaggtaaatgctcttgatgatgaccagaatttggatcccagaaaatgtcatcatcatccacacattagaagctcacaaagtcctctaacaccagctctaaaggatctgagatctctgtctctactctctggacaactgcacatacatatacagataaataggcataaataaagtaaatatttaataattagaggggtagagagttggttcagtcatttaaagcatttgccgctctcccatagagtcttggttcagtgtccagcactcacatgccagctcggaatcctctgtaactccagttcatgggtatctttcttcttacttttcttacttccttggctttgtattcacatggagcacagacatgcataaagacaaaacccccatgcaaataaattaaaataaatatctctttaaaattgcaaattgtaaataaataaatgatgctccattatctctttgctgttattataatgcaaatatattttaaatatactaatctaagctgctcagaatcttagttgtcatgttttatccccagatgttagtaaataattcaaatgtgatctctcatatctgtctccctgcatatcccagatgagctgccaacttgtgatccctctgccttatccttctaatttggggcattttaggtttgaagctggatgcctggatttctaaagtgacttctaaacactcatcacatcctgaatgtaggtgttgttagaatatcttctactgaggatacttgtcctgtggtaatttcagtaattgtgataggacctaatttctcctaaatcttttgaaaataatcagtaccatgttataagaaagagctggcatgaggattacacacttgattccagcagagataactgtttccttactgttttttaaagtggggtagctgataagccttattatgattacagttatccttttgtaactccataaatattattagcaagtgatcgttcttttacatatagtttatcatatatagccactactgaaaaaaaaccaaacagactggattactgtttggtttcaggattatttatagttttaggccttttttttttttgtaagagctacacaaatctttctcattctgacccctagttggttgctgggcctcatatttcctctttccttcatattttctagctctaactatgttgatttagctaattaatattatctatacctcatagatgcacaagttttactcagggtttttgcattctgtctgcattcagaggctagaaggttgggtggggaaagggaagagtagaagaaagaatgcagcttcaggatgagaagaatagagatggaaagaaagggagaagagagagagaatgagggagagaaatgagagccaaagagaggggatgagggagggaggtgaacaaacaggacctggacagagaggaagagataacagaatataggaaggggagtggaggagagaggaagccaggacaagggaggggagggaaggttaagattggaggggtaggcgaggaagggagaaaaggggaagggaggggagnnnnnnnnnnnnnnnnnnnnnnnnnnnnnnnnnnnnnnnnnnnnnnnnnnnnnnnnnnnnnnttctgccccttgcaaattcatatatattgcagatatctagaataaaactttcatatctctgagagagaggagagagagagagaggaacggagggaggaagggaggagggaaagagacagagagagagagagggagagagagagagagagagagagagagagagagagagagagagagagagagagagagagagagagttataaactgtaagaaaggaataacattttgctgtaggtctttgtctctgtcccttatcattcagtaataaccagaccaaggactgtttagaaaaggaaaatgaatgaaaccacaggttcattacacataaagcaaagaataaatggatttcctcaatattatgttagtactagatgccgacacctagctgaacatttatgttgagtaaattggaagaaaactaatgatgcaagaaatgaaacgctgggtaccatatcagaagtttttagagaacatgccagaacctgttctcctttctttgtcctcttttacttctgacatggaattatcttctgaaacatataacccaagtgaaaggttaatttcaattaacaaatagaaaaaatttgttttcatagcaaaaaaagaaaagagaaaagagttgtcaattatatataacctagaccaaaatagaccaacatagaaagaaggttcaaggagtaatatagtatcctaactcataacaaatggaaataagaaagatgtccttgtgtacatgtaatatataagtacatgtgtatgtgaatccaagactcaaaaccagagtgagtgttattagagaggagaaacaagaattttcatgtaagggatgaggataagaaatgcatgtgaaattggagaggggagtgtggaataggggtggaagcatacaaggaggaaggggaatgggaagaagaagaaagaggatcaagagaaacaagttaggtgtggaaataacacagagcttaatttgtttttaaaaataaaaatacataaatgaacgacacatctaaacaaaacacaggcaaagtttatctgattcaagtgagaaaggatgaaagtgctgttatacaaatatatgattatgtagaagatgtagcaagctatctcttctcatattaagtttcagtctgtttcattggcaatattaattatctttaaagacaatgcttttgtcacatccctttgaaaaatcttagataactcctgctatctcaatggtagatcaactccattcaactccagtaaatgcccctagtattccccttttgcttcacctatgacctctctttctgtcttcccatgtacattaaattgattgcatttcactactgagtctagatgcacatgacatgcatattctttgaggtcattccatcactactctaataatgcaatctgcccttttccacctgggtattttcagtaaaaggtggccacattgataaactggacatagcagaacacctctgcagtccacacttatgagaggtaggcaggagggccaggagttctagaaaatttttggctacatagcgagtttgacaacaacctgtgtggtctagccaagaccctgtctcaaaaattattatttcaatgaaaataacaggaattataataacaagaggaataggtagagaataatagtgagcatgaatcttttctattgattatcttgtttggctaaggaagtcctatagaggataacttgttcttttgcccattagaagggagtacagtgctttataaattgattatagaccaatcaatacctttcaatcctattgtacagcctctttgtcatgcttaagacagcagagggcaaaggaagtgtagttaatgttagcatacacaagataaagtagatgttagattcattaaagtaattaaagtaaagagagctgcctcccaacatcagttgccacaactttggcctttccaatagattttctcatgaaatccaatcaaacaatctaacttttctttgtttaaaaaaatagttaaaactctggcttctacttttaggccaatttccatagtttgaaccagaccactccctgtatctctttctggaaaagagagttaaaatgcagtctgctttgactttacagctttcagtttttggtacttaactcctccttgctccttgacacatacactccactgagctaaaaaaatatgatacaaagctctccactaaatagttataaaacatcggaggttttctttgtcttgatgattggcataaggctccacagggagattgttaaggtgtttagagatgaaggctattctctaaagaggctcttctgctcctccccacatcctatcctagattgcttcctattagtgtgataaataccatgaggttggaaggcattatttgaccgatgcttccactgtcattgtcccccatgactccatggcaggacaggagctcagattgggaactgaagcagagacaaaggagaaatgtaccttactggctcacttttcatgtcttgctcagttttctttctcatataatccaggactacctgcccaagaactgtactactaacagtgggctggcccacatcaatcattaatcagggacatactcccacaggcttgtgtatgggtgaatctgagggaggaattttcttaattgaggttttctcagctcaaatgactctactttgtgttttgttgacaaaaataactaaccaacactattgaccctttatctacttggcatacaaatccatcactattaaacaatagcctttcctttcatatttattcataatatctcatgttaacatgataatataaattacagtaaaactttgaagctacatatattttcataaatcaaatatatttacaagccaattttttgaaaacagcaaaagtctctcaactatgggctcctataaaataaaaagcattttatatactctgatactcctagaaagaagaacccagtcacagacacaatttaatgaaagcaaaaccaaactctcaaagtgtaaataactccatatctaatctttaagactaactcttctggtctccaaaaatttggccagctccaattctcaggccctgccatctttagcacgaacagtttgtcccacaagctcagttgatttcatgcaacagctactgctgcatgggcatcatgggtctggtatctccaatacagtagggtctccactgttaagtaagaatacaccttaccaatggcttccgctggcctctctttagggacttcatcttgactcataggaccaagtctcatcctttctccatgacaccttcaatcctgagaatcccattacaactgaacctgcatcttcaccaaaggcctctcacaatgccagctgctctgcatgaccccattctgtcctgcagcttttatgctacaccaaataagtatataatatgttctaaaatcatagtgaataagagaaatacacaattatacaatattgaaatgatcagtgttgaaatgttgatttgaattttgtgtagagaggtaaatgttctgtcctcttttcatggcaatcttaatagatttggtttaatgagtaagtatgtccaccttaaaaatattcagcatttgcgatgctctccacattgacacagatcatgtatgtggacaatatgcctttgatataaactattgttcctttaccttttgaaatgccatgtttccaccgaactgaaaataatgagaacaacttttgtcagaaaaaaaaaaacaaaaaccataaaactatatgattaaaaagtacaaactttacaagacatttaaaaattatgccattacatttttactttattgtgtgtgtgtatgtgtgggtagtatgcacgcccacatatgcatgtctttgtatatgtaaaagcagatgctggtggtcttcctctctcattctccacttttaagttagtatgtctcaatcaatgaaccaaatgctcattgattggctacagtagccagccagtgagacatagtaatccatttgtctctcagatcaccattaggtctcgaggtgaacactacacctgaggtttaatgtgagttttggtatttaagcttaagtaagtccttatggttgcaaatcaggcagtttactgactgtgccatctccctagccttgtgctcacacatcaatattttctgtaaagtgtggttcaggaatggccagaaagtcaactttcttcatttacacaagttagaaaagtgcttctgattttcctgcttctttacacatatttagtttgtatcttgcattaatttattttttctttttgtacctttgacagttccctttagcccagtcttatctcactctgctgtaagatttgctttgaattctttttttttatttttaattaggtattttcttcattaacatttccagtgctatcccaaaagccccctataaccccccccaaccacccactcccacttcttggccctggcgttcccctgtactgaggcatattaagtttacaagaccaatgggcctctctttccactgatggccaactaggccatcttctgatacatatgcagctagagacatgagctcaggggggggtactggctagttcatattgttgttacacctttagctcctggggtactttctctagatcttccattgggactctgtgatccatccaatagctgactgtgagcatccacttcggtgtttgctaggccccagcatagcctcacaagagacagctatatcagggtcctttcagcaaaatcttgctagtgtatgcaatggtgtcagtgtttggaggctgattatgggatggatccccgggtatgtcattctctagatggtccatccttttgtctcagctccaaacgttgtctctgtaactacttccatgggggttttgttcccaaatctaagaaggggcaaagtgttcacactttggtctttgttcttgagtttcatgtgtttcgcaaattgtatcttatatcttgggtattctaagattctgggctaatatccacttatcagtgagtacatatcatgtgagttcttttgtgatttggttacctcactcttttgtgatttggttacctctaggttcatcagtttgcctaggaatttcataaattcattctttagaatagctgagtagtactccattgtgtaaatgtaccacattttctgtattgattcctctgttgagggcatctgggttctttccagcttctggctattataaataaggctgctatgaacatagtggagcatgtgtccttcttaccagttggaacatcttctggatatatgcccaggagaggtattgctgggtcctccggtagttctatgtccaattttctgaggaacggacagactgatttccagagtggttgtacaagcttgcaatcccaccaacaatggaggattgttcctctttctccacatcctcaccagcatctgccgttacctgaatttttgatcttagccattctgactggtgtgaggtggaatctcagggttgttttgatttgcatttccctgatgattaaggatgtggaacattttttcaggtgcttctcagccatttggtattcatcaggtgagcatgctttgtttagctctgagccccattttttaatagggtaagagctatctggctttgaattctttatcaccctttaaaagcatgtaatcaggactaatatccacagcgatgttgaccattggttattttcttcagaaatttctttttgttttattgagatgtttctaagcaatctaaatacatgggagatgtagaattgcagcattttaaaaaataaaactgattgataatgtaatttgcattacatgtgtgcttgtgcttttcccatatgaatggtaattaaaaataaatagcattcagcagttcccttaaagactttgaacagaggcatcaaccttctctaaattaatatttaaagttgcatatctgaggagaaccatctttgggagatttacatgtggtcctttgttaattcaatagaggggaattatacatgagatctaaacttttttattagtccaaataataaatataacatatatattagagatatgttagctttccaagatagataatataaactttctttggaaagaattcagctaacatgtgattttgtaatttatctgtattctccaagataagtaaatgcagctgtagcatacaacttttaaagaggagcataattgattactaattgacatgcagtctgcaatttgagcttctctctactccatttgcatctccttgtgaattccaagtaatgccctcaggttggacatacttagttgctctctctctgaccccatctcattccctaatttgtttggtttgacttaacagccctttctttttagcaggaactaggtgatttagcatctctcactttctctctctctctctctctctctctctctctctctctctcactatggcagtgaacattagttatcacttgctataagtcactccccaaagtgataattctatccataaattttgacagatagtaggcactgcttataatcaatcacaggggaaataattgatgtcgattgaatcaaataaatgtgatgcttacagagtggtgaccctgtcaatcaacttggagaaaagaaatctacaagatctgaagaaacaaagtccagaaagtcttgctttctatttgcttagaaaagtaaaataatagtctttgctttaaaaatgattctctttgcaacatggaaaagtctaaagctatgcaataaacatcctaactattatctgggtcaatgcatatttctcatcatacttgtcttgaaagaagtcttgttcaacttcgcattgcataaataatatcaaggaaatggaaccttaaagtaaattaatactttagtgggtcagaagtctcactttttctacctatacttagtcccaccttgtacacacacatacacacacacacacacacacacacacacagagagatatagatataaagatacagatagatatagattctgacaaaattacttagaattaaatctatttcaaatttatttcaaaatttaaattaattgctgtagagatggctcagtgagatgtttgtcataaaagtaggacgatgtgacttaacaaccgcagtaaccacctggagaccttagtacactctacacacctgtaatctcagggctggaacaatgaaggcaggagaattctttagagttactaaccagatcttctagcttcataagtgagcaccaggctcaatgaaagtcaatctctcaaaaagtatgataaaataaaagtgcaaattcagaagatattattgctacctttagatttatcatgtatgcatatacccatgtgtacatacccataaacacataaacatggacacacacataaagtaagattgccttaatgtgtttttttaaagggctactgcctagcctgcttttgaagactgccctcatgagaagaaaaattttcattaattatgttgattgaactggaaatagtggtttgatctgccccccatgcacagtgaactttatattgaattattgcttacataggatgcacacagtagaattattgtgaccataaaatgctgatggttttccctcattcttgtgtgtgtgttatgtgtgtgtgtgtacatatttggatgcatgagaatatgtgtgtgcacatatctgtatattcaagtggagacattaggttgatttgggaatcattctttgttgctcttccaccttattcactggagaaagatctctcaatcaaaccagaacctgctgttaaggttagtcttgccttgcagcttgctctgaggatcctctgtctctgccctcctgtggtggaattacaggaggtccagcagacctacttagcatttatgtgagttctgagtatctgaactctagttctctggcttgcacttggatcactgagccactgtgattatcccaagcccctgacaatgagttttgttatacctgttatactgagaaatgtccaagaacattgactctgaaataagaaattcagtcagaaactgtataaagaaaaaaaaatcattagttttcatttgtcagttcaggtagctccagggacactgccttctgttttgtccttttattaattaaccagatcctgagcactaaaagcaatgagtcattggtaaaatgcatctgttttcttagagcttcatgtctagtgtgatccttttgcactcaacaaaccaccaattaattagtcatgttatctaaggatataatccactgcatggggtaatattaaaaatagttcttactttagtatataatagttcaacctatgcaaaacccattgtgttttactgaaggaggataatattattgtgtgtactgttttcattttctaactggtaactgtgtaattgaaatctataagtcaaatgtcaagtagaggttcaacacgtgagcatacagggctgggatagaagctcagtctgtaatgtacttgtcttgcaagcatgaagatcacagttctatccccagtctctcatgaatcaaatccagatgtcttgacacttgcttggaattccaacattaacaatgcagagacaggaaaattgctgggaacctctggccagtttatgcaaactggtgagcaacagttgtagtgagagacatctcaaaaatgctgacaaacacacctaatgatgatctctggccttgacaactgtttgtatccacttgctcatgtacacaaatatacagacagacacacacgtgcgcatacacattcacacagagacactaacacatacacacaagagagaggagatagagtgagtatattgtttgcattaaaagactagtgagtcaacctggcagcattagtttaattaacctctgaatttggaatcataaattttatgtcttcatagtccaatttgttgagcagagaaaatagtcgtagttaatggccctttcaagtagggtctgttgataggaatactggtactggttaaaaagctacatcagtgaacaatatgattccttctctcctgcccacctctgtgggggtaggggtggggagtggggaggtgtttccacagaatcataggaagttaaattaactttggggccatgatgtcttagaagatactcgtgcttcagatacacaagtatgaagacttttccctttgaaacttgtgtccataggcacagttcttagcaaagtctcctctgggaccatactgctcaggttgtggatagtcacaataaacattttctttcaggcaacttttagttcttccactggcttgtttggtagaagacagacggcataactgtaaaatcctgctgtgtctataaggaaaatgtaatatggttgatcgtttctatcttcccacatctatatatcatttctaaggaagcaagcagtgtcagatagaaacactgttgattatctcatgacaacatattatttcacatgttcctttgtacagcctataattttgactaaaagccaaatgctttgaatgtagaatttaaaacttaaaacagcttttttttcttttttctttttttttttctttttttaaagaagtgaacttgcttcccatctcaatgcatgtgctgctgtgatactaggtaccacacctggcattctatctgagggctccttgtgtgcttactcaccattcacagttaaactttatgtctagctcacaatatcacaaatcttgtggaatttgactcatcatataggaaaatgaaactaagaaattatcaggaaaacaggtagcaatggaaaacagattagatgaggttactcaaattcagaaaggcaaatacgaactgcccttctcatgagcacattctaacctctaatcctataaacgccaggaagctagggaggggtcccaagactggaggtgagatgctccatggatgcaacttaagaaagtagagaaaaaaatggaagagggaacagcagggccaggagtcaacagggaactggggagcagggaaacagagcgggaatagccaggataattgatcaaaagtgggtaggaaaatatacgacaagtatattaaacctccacatggaaacctacttatttgtgagttaatttacacaatgaaaattaaaataaaaagaagcagtgcccactaaggaaaaaaattccctacctttgaagatttttaacttattctttcacaggctcccgaaagtgccctacagttgttacttggttttaggaagggcttgttttattaagtttgttttgttgtttacacaaatagcaatattttttattgatgtgatattttggtgtcatattttactatgtataaactgattgcactaaaaaatgtgctccatttcgtatggctgaattcggtcttattgtatataaaaggcccttctttatagataattagtattcatttaaagataagaaaagaacagggtgggtagaatccactgtttaggggttgagacaactattgctcttatgaatagtccttagcaggatgacctgtgacacaagcctcactaccagactgtttcattgtattttcttaggaagcttgattttctagtcttctgtgatttacattcaaagaagaagacatgatgtattcctatatatcagagtggggacaatctttttcatggtgttcctacataacagtggagctaggatttgtctatgtaccttctgaaaagggatttgcgaagttcatttccacaaatcatagctctgaacatattcattcattgtcattgttgactaatgccaatgcaactaattgggactttactgtcctcagggcaatcatttacttaacaggagagtggagtagcttcattgtttatcagactttgtttcatatcattgagttcttgtcatgaagatcatttccaggcagaagaaggactggctgaagtataatatttcagcacttacatttttattacatttatttattgtgtatctatgtgtgtgttgcgtggtgcataccacagcatgtgtgtggggctcagtattgacttctaagagtaaatatgcttcttccatgaggtctctggggatcacactatcaaacttggtcataaatgctgtgctacaccacctcattagcccataagcagttttcaccgtgcacactctgattcaagtattataaccttggatgtgtggctaatcaagaatatagacagtaaggatatgagcacattcctaagaattcccagataactgggaatcagaattttacacttaaaaaacaatacagtttaaaatatctatattagttgatcctgtataattaaaattatatgtaagcatggaattatttacaacacgagtttcctaataaagtgacaatagtgtcgactattggtaagacatttgtgaaacaagaagatttcataagttctgttcccttaaagtcactgaatggcttaattggtcctaattcttaaaggtgggtctctaatcaccctgtttcttaggctatgaagcccagtgtttcccatgtctgcaatgtactcatttaaatttaaatgtaatgtgctgctgagaggaagattcaagaccatagcaagtagtgccttagccaagtaatagagaaaattgaatttctcctgagcaatcttgtattatcttcttgttcagtatctcgtggtactttccgaaattgaattttctattttctttcttaactctcttcagttgctattcaagtcttcaagtatttcctacactgagactagattttttttttttgtctctgtataggtcaagaaagatagttaatacctgtgtgttccatcatgtctgttggttttttactatgatgtaacactagaagatgttgaagccttatacatttgtcaatatgacttgatttatgatcatctcaactggtcttttctaccctttgaaaatcatctccaaaattcacacttgagaagttcataattgagttaccacaatgaaatgcagaaaggagagagagagagagagagagagagagagagagagagagagagagagagagagagagagaaaatagcagagaaactaaaaattcccccaaaccacctcttaatgctttaaggaagtctatgattttctattacttactgttcaaagttgtcctcattggacacagacgtgactattaattcactttattgaagtacaccaactgaaataaccttcccatccatgtgtgctcccttttctttcttttaagtttcgtcttttgagcacttcctacaggagtactcactcagcatcacccctactcccctcctcatgaaccctaaagtttctgcttttctttctctcctttccctgcctctttccttgcctccctccctcccactccctccatttccctatcactttcttgatacaacatcttatataacccaggctgtccttgaactcttgatgtagctcaaggatggccttgaatttttgatcattcattactaccacccaagtgctgggaatacagacaggagtcacaactgcagtttaccaggtgccagaaagcagagaaaatgactttgtgaatgtgaagcaagcattttctctacatagccttatccctggtcctgaaacctcttctagtgcagggactcatatatctatgaactatttctagtgatattgatgattagaatttgtataacatcagaataaacttttcaaactatggggaaagaaaacttgaattcataagaaacaaattagccaatttgaatagtgaaaatcaccaatcagcaaatgacacataaatgaaaaacaaatctacataattcagtttattcataatcctgccttgatattttctcatttttaattatttgagaactttttacaatgtgttttgattatattcactactccctgtacccttcccatatctgctactattcctctacctctacaactttggatattgttagaataaattgatttttttaaaacaagtaaaatctgttctctccatttattcttaaatatgtggacttccagtggagtatgttcatcccaccatgtgccatatccttgaagaaaggtgtctccccatctctcaacagctatcaattggcaatgaatagcttcttagctaggagtagggctcaatacccatcttccttctccttggtggaagattgtacagatcttgtgcctattgtcacaatactgtgagttcataggtgcaggtttctttgtatgtctataaactctgttgcctgcatatttctcagctttctcactttaatacagtctgagacccaagtccaaaaagtggtattaccacagttagagtaaatgtattctactaaattaactgaatctagaaactccctcacagacacacctagaattctgtctcttagataactatagatgctgccaagttaacaataggaaacaaagcaaatatatgtaccccatcccttctgctatcttgagagggataaaaagtcagtacctgaacctctggctcccttgtctgctcaattcagtggcttagggaatgatgtggttgacattttccaggatcactttgtttgatctttgagcagaatatttagcagcttcacaaacattgtgcttttaatattaactgggtgagtgtgggccatgttccatcttagatgaatatacatgaagtagtggaggaaatgagaccattcctcctgtattaaagttctctaccatcagagaccttacagaagaggtcagatggattttgtgttgagaatcagttgaatgttgcattcactatggggaatagcaacattctccagatattaatgtcaccattaaagtaattgcttagtgaagatctgtccccagagtttcatttcctgttaaacaaccaagttttctcatcaccttagtattcatcacatttttcataagcagcatataaagaacacattaatctttataaatgtctcactatatttttatcccaaggttagttattgtcatatcttttcaaccaacagccttttcccttgacatgattacttatttattgatgtcttcaataacttcctggctttaaaggaaaaccatctgttgtacttgaagacactatcattaccaggaagatgaggcaaacctaattagggcacatgtacccatatgcactcattatttagcccagggatccacagttctctacaccatggctattgcactacactgtagcccatggttgtccatgatcagtaaaaatgggtagttatttctgaggatatgaggttttaaaaaaattaagtaatgttggaaataaaaccttcgttctatgatatttgatcttttaattaaatagaatgtaattggataggcatatgcattaaaataagctaatgtatagtgtatttgttgcataaaggtggaaaatatattaatgttatcaaatattgttttgtgggaaaagaacagagatgtagctgagtggctcaagatccagcctctaagagaccttggtttcaattctccacactgagtaaagcaggcatggtgaaataaaactgaactcttagcaattaggagatggaagcatgagtaagtgtgtgagtaagtatgcaagtaagtgtgcaagtaagtatgcaagatgtccaagatcatcttcaattacacaagagaatttgagggcaggctggaatatgagagaccctatatcaaaaataactattaattcattgaaacaaactctaaaattgtaagacaaaaggggacatatttaaataaggatggctttgctgaacaaagtactgaaattatatatgtactttgaaataaacatttaaaaagaaacaattattaaacaaattatattgaacaactatagtatgaaaaatagattcccatttcaaattgtttgtaaacatttcttttaatgttatttatgtgtgcatataacacatacaccatgcatataggtacctatagaggccagaagcatgtgtgagaccacctggataaggagtcagaactggttgtgacctgctgcctgatataaatgctgggactaaacccaagtctgtgcaagagcagcaggagtcttattcactgagtttcactgcagtttcaattcaaatatagtgttagagcaagaaatggtggagtatacattcaatttcaacatttgggagacaggaataatgggatctttatgagtttgaagtcagcatggcttacatagtgcattccaggccagttagtgctatatttcaaaactctgtttattaaaaataaagtaaaaaagcaaaaccacaacataaacacaatattagatatactgaaacaatagtgttatcaaaaaacctaacgataactaattatgtgatggtttctaacagagagctactgtagttggtacttgtttgaaatgaattagtaaacaagttttacaaaaacaatataaatatctgagattcatctgtagatgacacatacaaatttaaaagtcaaaatggtaaattggttaacagtggcattgcatccataaaaaaacaaaaaaaaaacttataatccacaatataaaaaagtatttcattatcaagaacaagaacaacaaaaaatcccctgaagaataaagagttagtagtaggcatgtaattatagcaaagttatggacattaattttcttgcagcataaattccagggagtagtcagcacagaaatatacttttttttcatcttttttgacaaattattcaataaaaaagaaaaaaattatttaatagtaaacatgttgtatgttctgatagttaaagttaattcctcaggttacacgaaagtatctttaaaaaaaactaagacttctctatcctttgaatatatatatatatattatatatacatatatgtatgtatgtatatcacagtttcattaagattatatttactataattatatcaatacttgaatattccttcaacccacatgaatattatttcacccttgcctcactttctctcactacttggaatctaacactcttgtaaatccctttcttacatttttgtcttaaggtttttgtcttgtgacccattgagtttaagcagggaattctatatggccataaacttctaagtattcgatgaagtttatttttggcttacatgtaagcatacaaagacaatgatgctcttccagaaatcacaaatagtaagtagtccactagattttgatttggtcttgtgagtcccttcctagtccttgcttgattgatagaaggcctaggcttgcatatgcctggctcaagcaatggtcactgctctaaagtcacaattgcagtggccatatcactactagaatgttatgcttcataactctctcactatcttctgacacttttctttatgccttgctaatgtcatcctcttctatgtactccccaggctaagtagaatttaggttgggcatttgtctttcactttgccctaaattcctttctacatcaatatgctggaaggaaaactaatttatagggagtgagacaatgttagaatttatttctgagtaaattgaaagcctatttacgctgtcagtaattgacctttaagagctgttcaggttacccaaccacatattttcaaatcatgctaagtgggaaatagtttaatgtcaattgatgtagaagttgcacatttgcattaattagtggagaaaggtctagcacgtgaaaatattttaatacaaaagggggtcattttaaatgaggttctgctttgagttagcaatataccctagtgaaagtaacatgttctgtgagaatcattaggactgtggatgaagaagtactttttaaagtaatatgtacaaagccctggggtcaatctctcacacaacagagccctgataggaccacacacatgtaacctaaacaattgggaggtagcaaaaaaaaaaaaattcaaggtaatccttggctatataacaagtttttgggtcagtttaggctactcaagacaggtttctttaaaaattaatcttagaaaaaaaagcaaactgaaacatctttgaaataaatttttccattacagttagtatcttgtacttgaaaaatgttccaagatttaggtttttataatttgagtcattggcccaccgtttttgttaaatgtaaacatggcacatgaaacatagttacacaaaaagtcacagtaggagattatatcttatagtttaacaatgttgctaaaaatatagcaaaatttccccactaggttttaaatataaaagagcaatacactatgtgagactatctagtgctgttgaaaaaaaaaagcattataatagtatatatataaaattatgatagcatgacaaacaagctacttttataacatagtatcatgatggcacaataggtcatttccataacaaaatgtgacaatgtggtaacacaataatctattgttttggcacaatagtgcattgtgatggcataataacacattgttatagcaaaatatcacattttcatgttataatagttcatggggatggcacaataatgcactgtgattagaaaatagatcactttagtcattcaaaaaaaaatcccaagatggcacagaaaacagttatgatgggaaattaggacattgtgatggcacaacaagtacattgtgatctcacaacaggacatagtaatgacacaataaggaacttttttgacactctaaagcattatgaacccacaacatagtactatgaattgaaagtatagcactgtaatagcctacaagaactctattctcacacaatggaacactgagttggcaaagcaatacactgatatgaaaatggcggtgctgaggtttttgatgtcacaacagagcacagtgatgtcacaacaaggtggaatgatgttacaatggggctctattgtgcaaaaataaggcattatgatggtataatagaacatggtgatgcttaaacaacaaattgtgatgagataacagatcattgtgaagcattgtgtagcactgtggtgttacagcagagcttcctagaccatggttatggcatattagttcctcaaaatgatagaaataggaagtagcacaactggacactgtaatgatacaatatagctctgtaatagcgcagtataatattggacacaatattgtcatggtacaagaattcattgttatggcataataaggcactctggagtcaaaagggggaacaatgatgacactgtaggacattgtgatggcacaacaggcgattttgaaagcacaccagtgcacaacaaagctctacaatagaacaatagggtacagtaacagtacaacattgttgagaatgaagaaacacaagtgagcattgtgatggcacagtagagaattttggtggcacaatagagaactataaacatattagaaaactctgataacgtgatagagcgtggtctgtcacaacaggacactaacatggcaaaataagacatgatgatgtctcaaaagtgtactgtattggttcaacaaaatattgttatggtataacacaccattgtactggcatattaagccattttgaagacacatacaacattgtaatttcaatggaggtacagtgatggcaaaattgagtgttgcggtggctcaatgaagtacgacggtggcacaatatggtattttgttggcacagtcaagcattgctattatataatgtgacactgtaattatacatcaattcattgtgataaaagagtatggttctacgaaaaaattctgatggccaaatagggcatggccacagttaaacaaagaaagcacttttaatagcacaataagtcacagtcatggaacaataaagagcctgattgacacaatagaggacttgaaggcattactagacattttgaataacaaaaactatatgcataagtcactatggtgtcaaaagacattatgtttatgcaataggtattgtcatgacatgacagagtgcactaaaggcataattgggtaattttataacataatagggcaatgtgttttttaacactatgatggtttggtaaatcatgtttttaccatggtaaatcatggtaaaatatggtataattaagcaatattacagcataataattatactgtgatgtcacaacagggcatggtattgatataacacagcactgtgatgagaaaatagtatactataacatcaccttacaataatacaatagtgtaggttattctgctgtcaaaatatagtactgtatatttaggtccctaggggttcatgggttattgttttggtaaaaataagacattataatcatacagaatgatattatgatgatgataaattagtgtatttggttggtaaaacaaaatctaaaatactacacatactattttgctatgtatacatgtatacgtacatatatagtgtgtatacatgcacacaaactttagtatgtattatattatacatattacttgccattacattaatggatattgttctataatatggtaatgaatacagtaaagtaacatgggcattgtgatattataatagggcacaacgataacataataagacacttatgcacttttatgtcataattcaacattgtgatataagagtggccactaatataacaaaatggggcactttatgtcaaaatacaccactgtgatatcacaataggatactgtgatgacatacgagggtaatattaatttatgctacattgtggtgtctaatagggtattgtattgttacaatagggtaggggattacataataacttattgttttgtcacactacaacactgatgtcatagtagggtactgtgatgacacaatatgaaagtttttttttttcaaactgacttctaacttctttttttttttttctttccatttttttttttgtttttttttctttccattttttattaggtatttagctcatttacatttccaatgctataccaaaagtcccccatacccacccacccccattcccctacccgcccactccccctttttggccctggcgttcccctgttctggggcatataaagtttgtgtgtccaatgggcctctctttccagtgatggccgactaggccatcttttgatacatatgcagctagagtcaagagctccggggtactggttagttcataatgttgatccacctatagggttgcagatccctttagctccttgggtactttctctagctcctccattgggagccctgtgatccatccattagctgactgtgggcatccacttctgtgtttgctaggccccggcatagtctcacaagagacagctacatctgggtcctttcgataaaatcttgctagtgtatgcaatggtgtcagcgtttggatgctgattatggggtggatccctggataaggcagtctctacatggtccatcctttcatctcagctccaaactttgtctctgtaactccttccaagggtgttttgttcccacttctaaggaggggcatagtgtccacacttcagtcttcatttttcttgagtttcatgtgtttaggaaattgtatcttatatcttgggtatcctaggttttgggctaatatccacttatcagtgagtacatattgtgtgagttcctttgtgaatgtgttacctcactcaggatgatgccctccaggtccatccatttggctaggaatttcataaattcattctttttaatagctgagtagtactccattgtgtagatgtaccacattttctgtatccattcctctgttgaggggcatctgggttctttccagcttctggctattataaataaggctgctatgaacatagtggagcatgtgtccttcttaccagttggggcatcttctggatatatgcccaggagaggtattgctggatcctccggtagtactatgtccaattttctgaggaaccgccagacggatttccagagtggttgtacaagcctgcaattcccaccaacaatggaggagtgttcctctttctccacatcctcgccagcatctgctgtcacctgaatttttgatcttagacattctgactggtgtgaggtggaatctcagggttgttttgatttgcatttccctgatgattaaggatgttgaacattttttcaggtgcttctctgccattcggtattcctcaggtgagaattctttgttcagttctgagacccatttttaatggggttatttgattttctgaagtccaccttcttgagttctttatatatgttggatattagtcccctatctgatttaggataggtaaagatcctttcccaatctgttggtggtctctttgtcttattgacggtgtcttttgccttgcagaaactttggagtttcattaggtcccatttgtcaattctcgatcttacagcacaagccattgctgttctgttcaggaatttttcccctgtgcccatatcttcaaggcttttccccactttctcctctataagtttcagtgtctctggttttatgtgaagttctttgatccatttagatttgaccttagtacaaggagataagtatggatcgattcgcattcttctacatgataacaaccagttgtgccagcaccacttgttgaaaatgctgtctttcttccactggatggttttggctcccttgtcgaagatcaagtgaccataggtgtgtgggttcatttctgggtcttcaattctattccattggtctacttgtctgtctctataccagtaccatgcagtttttaccacaattgctctgtagtaaagctttaggtcaggcatggtgattccaccagaggttcttttttccttgagaagagtttttgctatcctaggttttttgttattccagatgaatttgcaaattgctccttctagttcgttgaagaattgagttagaattttgatggggattgcatttaatctgtagattgcttttggcaagatagccatttttacaatgttgatcctgccaatccatgagcatgggagatctttccatcttctgagatcttctttaatttctttcttcagagacttgaagtttttatcatacagatctttcacttccttagttagagtcacgccaagatattttatattatttgtgactattgagaagggtgttgtttccctaatttctttctcagcctgtttattctttgtgtagagaaagtattatattagaatacaacacaatgatgtcacaataatgtaggcactatgatagcatcatagggtactatgatgacaccgagatgtgtgtcagcagaggattttgatgccaccaaaggatacttgatgtcaaaacacagtactgtgatttttagttagctctttgttcactgttatgaaaaaataagacattacaatcatgcaacatgggataacaaagcaggacattttgttagtacaacaaaatacatagcattcaatgatagtattttgacaggggtgatatttatgaaggcataacaggatattttcctgagatgacagtgggttcacacaatagggcaatgtatatcacaataacagggtacagggattacataataagttactgttttgtcacactacaacactgtgaagttatgtcattgtgacatcacaatagaacacagaaatattatactaggatagtgttaagtattaaatttaaactgttatttcacaatagagtacagatatatcaaagttctacagagttgtcacaatgtggcactgtaatgacactgtaattttaagtcctattaatatactgtgatttcacaatagagcactgtggtagcacagtacaacactgtgatgtcacaataagacattgtgatagtataaaaggacactgtgatgtaacaaacagcactgtgatgttacaatgaattactgagatgtcacaacagggcaatgttatatcaaaatatattttgtcatcacaatgaggaactgtgaagtcacaatacaacactgtgttgtcataatagggaactgtgatgttttggatcacggtgatgacacaatgagttactgctctgatacagtacacaaaactgtgatgtcataattaaatgacactgtgatttcaaaacttggcactatgactttaattcacggtcttttggtcagtgttatggtaaactaagacattatgataatacaacatgagatgataataacaaattaggacattttgtgagttcaaaatttaatttactatactatacaaactacttcactcttgccctactatagtagggtatagatgtaacattaaaagatattgtgctatgaagtaatggcacgtgggcaacgtgatgccacaacagaatataatgatggtataatagggcatgaatccccaatgaggcatcagagtatacagttgtgatttaataaaacatctgatgatcataggacatttgaatgatataacaaaagtctatgttagaaaactagagcacagtcatggcatatatgaattgccttagggttttattgctgggaaaagacaccatgaccaaggcaactcttataaggacatcatttacttgttcagagatttagtccagtatcaagatgggaccatgcatgagtccaggaaggcatggtgcaggaggagctgagagttctacatcttcatctaaaggttcctaagagaacactgattcccacatggttaggagcagggacttaaagcccaccctcacaatgatgcatttcttccaacaaggccatacctccaaataatgccaagtatggatcaaactaccacatggatattatttttacttttgtgatatatatgaatccataattggacattttcctgaaaagagagcagtttgggtttacatggtaagtcactttagtgatttgagtgataattgacccatatgtactttgaactcttaatccctagttggaggaaatatttaggaagtattaggagttatggctttttaggagaaagagtatcactgatggtatgttttaaaagaccatccattcctagtgagctctcttttaccctccattattttctctctctctctctctctctctctctctctctctctctctctctttcacttactgtcttaacaattaagttcacaagtattgatacatttctatttttgactgccaactgtcatactccctaccctaacaatcatggactcaacctctagaactcttagcaaactaccaaattaaatgctgtcttttctaagtatccattgtcatgttttctctttacagcaatagaaaagtaatttaacatagtgtcccacccacctggggatccatcccatatacagttaccaaacacagacactattttggatgccaacaagtacttgctgacaggagcctaatatagctgtctcctgagaggctctgccagtgcctgacaaatacagaagtgtatcctcttggccatccattgaaaagagcacagggtccccaatggagaagctagagaaaggactcaaggagctgaaggggtttgcagctctataggaggaacaacaatatgaaccaaccagtacccccacagctgccaggactaaaccagcaactaaagtggaggattcatggctccagctgcatatgtagcagaggatggcattgttagacatcagtgagaggagaggctcttggtcatgttgaaggctagatgtcccagtgtaggggaatgccaggacatgaaagcaggaatgaatgggttagtgacctgggggagggcagatgagataggggagcttaaggagggaaaagaggaatggagataacatttggaatgtaaataaagaaaacatctaataaaaaaagaaaagaaaagtaatttatgcaagcaccgtggcacaatagagcactgtgtataatcaattgctaattaatattgacagtatagggcagtatatttgcacagtaggtccctactattttttagttgacttctgtagtaagtttataatgtaaggccttgtgatgcaaaaatatggcacactgatggtataaaagcacttttctggcccaacatattattttgatagtatatgacataaagatggcattataaagcttgatttcaccaaagagcagtttgctggtgtaatatacctggtgatacaacaataaagcattctgatagcaagatagatgaggttgatggtactattataggacataggtatggtacatcacaaataggtatgacattactgagccctgttttgtcatattaagaaactgatagaaaaacaaggcactattgtgagacaagggacttttgttagcataacagatacagtcatagcacagtagagtactgagtcctctaatggcacaacagggactgtgatgataccatagggtactgggaaaacacaatgggacactgtaatgatacaacagatccctgttatatcatacttggaaatgatattgtagggcatggtgatgacaaaattagacacttcaatgataaaacagatacctgtaatgtggtattaaggagcactgttgttataaaagcagactgcaatttgacaactgggtagtgttatatgtaaatagaatactttgatgacacagtgggggcacagtaatgaaaagtaggaaagtgatgtctgaatagagagcagtaatgacacagtagtgcattgtgttgtaacactagacacatagggcccaaatatatcaccatagaatatttttatatagcaataggttattggaatactataagaattgatatcacaataggcactctgattacactagaggtactgtgatatcacaataaggaactgagatgaagaatggatcactgtgatatatcaggatgcaaaataaggcactgtgatgtaacagtgggcaccgtgatggcacaggatgtcactatgggaacacaataacaccctttgatagtacaataagactacatgacaaagtagaacactggcttggcacaatagaccactattacatcacattatgacaatgtaatgtcacaatagagcatgctgatgtcacaatagggcactgacacatagtaatataggatactgatgatacttttgggttctgtgatgatattggacaccgaaatgacatacaaagcttactgtgttaatacaatatggcactagtatatcccaatacaacactctaatgtcacaatagtgcactgtgctgatacagtagagtctctctatggtggctcagtagagcaataggatactacagtgaaaactgtaatgaacaaatagtactctatgatgatacaataaggcacaaacatgtcacaatataacactgctttataactaaagagttaacacaaaaggatattctgatgccataaaaagatctctgtggaaatacaataggacactaaggacacaataagtctctgtgataagataataaggcacagttttaacatggtatgtcacactatgtcattgtaatgtcacaataaggtactgtggtgaagcaatgtttctgtgatattcccgagtcatgtaatggcacaataatatatgataatgacacaacagggcactgtgataacacatatgtgcatttttgtcacaatagcttactgtgtttactcagtaggacacttctgtcacacaacaggacactgtgatgacaaaacatatttctatgattttattccataataaagggccatttgatggcactatagggtaaaacaactcaataaatccttctgatatttcagttggacaatgtaatatataatagagcacagtcatgtcatgagaagatagaatggcaaaatatggcaaagtgatgacaaaacatggtagtgagtgtcaccgagatgtcacagcagaaaactttttaaatgtattagtatttacaagtacagacacaataggatactatgatgacaaaatagggcattgtgatgtaacagtgttgcacagccgagacacaattgtatgctgtgatattacaacaggacattgattgtcctttatgatagtcacagcaaaataaaacattgataacacaacatgagatagtaataacaattcatgatatttagttgataacacagttattgcactacaggttagtattttgatatttgtgatctctatgaatacataattcaacatttttctgagataataacataatattttttttcagaaaaatgcactttggtggttggaaggcagttggacctgataagctcttttatttgaatttgtgattctgagttggtggaaatatttgagaagggttaggatgtgtggtcttctttgagaaagtgtgtcagtgggggagggggtatactttgaggattcaaaagcctatgtctctgggggagggggtatactttctgtctttcaaaagcctattctctctctctctctctctctctctctctctctctctcacacacacactcacacacacacacacacacacacacacacacacctcatggttgttgtcttaacaaataaactattagacatagatccagaaccattttccttccttgctgccaaagtccacactataatgatcaaggacttacctaccaaatttaatgctgccttttgtatgttgccttggtcattttaatagaaaagtaattaagacaggcactttcattgcacaataaagcactgtaaatgttcaatgatcattgtgatggtaggctaggacacagtgtttgcacattaattcaacatggggctgcaatagaatactgacttagtaagctaaatcactatgatgttcaaagctggcttgttagatgtacaataaagaggtttatggaacatgatattattttggcacatatggaataatgatttcacaattaagctctgggatttcaccatagagccatttacatagtactccactgtggtgcactagtacagagctttgatggtaaggtaacatagggtgatgatagaaaagtccactgtgatggtatatcgaaattcttcatggcacattatgttgtcggtattcaggactgttatggcatattaaggcactaaaatggcaaaacgatactgtgataaaaagagtcctcttattgcacaaagtgtagtgaaacaatgcattagggtgatgtgatacacaatcgggcattgtatgacacagaaacatagcaatgacacatcagatacctctattaccatgccaaggctatatggcctaattagctctgtaatatcaaagatgggcattgtgatgacagagttagtcataattagtaatgtcacaatagggaactgttagaatatagtaggacaatgtgttgacacaatagagcagttttatgtcacaaaagaacactttcatggtataacagggcactttgatgcagcaggatactaatgacaaaatgtggcattgtgatgacaaaataggatacattgttggcacaatatggcactgttttgtcacaacacaaaatggtggtgtcacaactggacactgctatatcatagtaagattggaccctatgatattacaatagaattacagtggagcactgtagtaacccactatgacaatatgatgtcatatttgggcacttctagttcacataggatactgtaaaggaagaatagggtactgcaatgttacaattgggctctgtaataacagaaaaaagcaatattgtgtcatgataagacactgttatattaccataggacactgtaattaatatagtaggagactgtgatgacatgataggacacactgacattgcaataggactctggagtggcatactgataatacaatagcatacactgttgacagaatagtgcactgttaagacactattgagcattctgataaaaatagggcatagtaataacaaaagcaggttgctgttgccttacaaggatactgaaatatcatgataaatcatcattgtgctacagtcagacactgtgctgacataatggggaggtggctctagggtcaaataggacacatcgtggcacaatagggcacactatgttgacaaaataggacactgatgtgtcacaaaaccatattgtgatgtcaaataggggagtactatgtaacatcaagacagtgtgatggtatcatgcatcagtgtcctagtaagctaggataatgtaatacacagcaggccatggtgattttatggtaagacactgctatgtcaccattgtacattgtgttgtcagaatgaggcactgtgatgtcacagtagggcactatgaccatgatagggtactattataatagagtgggatatcataaatatatagtagggcactgggatggtccaatatgaaaatttgatgatacagttagtcattgagatgttatataacaatttgttggaacaataggagactttgtttgttctgtagaacacagtcatggcaatatagaacattatgctcaatatagagcaaaatggaatggcgacaatagttgatggcattgggttggtataacaaaagtcattgttggtaatacagaacagagtaatggtactattgggtaatactttaacagttgtaatttctatgcataattcagcatttttcaaaatgatagagtaatgtgtttgtaaaaataaagcactttaatggtttgaattaggatggatctccttgggatcttttactgaaattcttttttaagaatatatattttttatttttaagaaatattttcttttttattaaaaatatttttcttatacaatatatcatgtctacagtttcccctccaaagttcctcccagttcctcccaagtcctctcccatccagattcactcattttctgcctctcactagaaaagaattcacttttcagtggtaacaacaaaatataacaaaataatatataatcagataaaagaaaactatcacgttgagtttgtacaaggaaaactaacagaaggaaaagagcccaaagagaaaacacaggaatcagagacccaataatttttttccacatcaaggtcaaaaaataatactaaaatgaaaaaagggtataataaatatgcagagacctaggagtagaactgtataggttcagtgcttgctgcttcatcctcagagtgtttgtatgagctttgctcagttgatttagagtgccttactttccatttccactgtctcttacactcgttctgacttctacaggattctctgagctctaagaagagagatttgatctctccatacagagctaagatctctttctgtgaaatatctggttgtggggctctgtatttttccccatgttctgccagaagaagcttctctgatggtggctgaagaagactcttatctatgaagatagcagaatataattaggagatttttgttaatactttttctctcagaccagaagtatttttatcccagttatttgagatatctagtctctagttcttggttacctaagaagtgttgggtatagagtccatctcatgaagaaagctataagtcaaatcaaactttgcttggtttctccaacaagatttgtaccattgtttctctagccaattttccaggcatcacagattgtagatgaaagggtttgtgtatagattggtgtttatattacttttctgtacccatcaaactaccatcccatttaaaaaaaaaagatactagaaaatagagttcaaggtctgatgcaggcaccagctcaacctctccatgtttaatgaattgtgtggattttatcttcaacaatggggctttgctggcagtttgtggagctcaacctactgtcctggcaaagatatcaattgctttgggattcttcttggaccttctttggccaacaacacaattggatgtagctactgggaagcttcacttggtgacaggaggtggctagttgggactccatctgcctagttgtttagagacttcatgaggtcccattcaatatatgttagtatgtttcctttggagtaagttttcatagtattcctcaaatgtccctcaattctagctctctctgcctctcaaacttatctactatccctgccaccacctgttactcccatttccatcatctctcctctcagtacacccatagaatctattctatttctgccttcaaagaatatagatacatcctactagtcccttcctctacaaaagcagttcctaccctgtgaatcataaccctttagcaaacctttatctcaaaaataatcacattatgattcataacagtagcaaaattacaattataaagtaacaagaaaaataattttgtagttagggatcagcacaacatgaggaactgtattaaagggtcacagcattaggaagttagggaaccacagttgtatacctaacctctctgggtctgtggattgtagattgattattatttaagagttaacatccacatgtaagcaaatacataccatatctacatttttggtcctggctcactttcttcctgatgattttcttttgatagttccacccatatgcctgcaaattcatgatgtcttcttttaacagctgagtaatactccattctataaatgtgtcatatttactttatccattattttgttgaggaagatcgaggcttttttccaggttctgagattaaacaaataaaactactataaacaatgagcaagtgttcatgtggtaggatgaagtatcctttggttatgtgcaaaagggtgttttattcctcatccttgccagcataaactgtcaattctgttattatcttagttattctgagaggtgtaaatggaatcttaaaatggttttgatttgcattaccctgatggctaagaacgttgaacattttagtattactcagccatttgagattcctacattgagaattacctgtttagatctataccacatttttaaatggcatgttgtcaatggaatcaaatttaagacccaaacataaatccacacatctgtggacacatgattttttattaagaggtcagaaataaacactggaaaaaatgtcgtattcaacaaatggtgctggtcaaactaggtgtattcaagtacaagaatttaactagattcatgcttatcacaaaactcaagtataagtgtttcaaaaacctcaacataaaacccatacactgaagctgaagaagagatagtgtgggatagctttaaatacattggcacagaaaaagtttttctgaacagaaaactgttagttgagacaattggatcaacaattaataaatgggaccttataaaactgaaaaacttctgtaaggcaaaggacaccattatcatcatttgaaccaagttgcagcctaaaaaatggaaaaacatttttatcaactctgtgttaatcatagtggcaaaaaaatgtaatgtgatgataaacagaattctctgaagacacagtaggtacagtcatgatacattagggtaatgtgataataaattagtggactgtaatgatgccacagatcacttgatgtcatattagtacaatgtgagttcacagtagatcaatctgatgacaaaagaaggtcactgtgatgtctcaaaagacaatacgatgggaccatgatgatataatagggcactcttgttatacagtaggatactatgatgacaaaagagggcagtgttatgatgtaataaatcacagtgtcaaaacaatacagccccaagctatatacacagaccctgtgaaatcacagtaggaaactacattgacaaaactaggcaattttatgtcacaaaagaacaatgtaacgtcacaagaggcccctgtaattatatagtaggatgcttggataacaccttatgacactttgatgacataacaaaacactgccttaatatactaggcaactaacagattattatctatcactgtgacacaatggtaggaaattatgccaataaaatagagcactatcctgtcaaaataagtgactgctatgtcacaataggacagtttaatgttataataggaaatgggaatgatacagtaggataatgtgatgacacaatatgacactgtggggtaaaatagtgcactgttttgataaaataagatactgctatgtcccaatggaatattattttaaagtactaggattcaaagatatcacaataaggcactatgctgccacaataaagcactgttatatcacaatatgatattgttatgtcaaaatgcaacactatgattacaaggtagaaatgtgatgttacaacaaagcacagttcataaaatgtcactaaaatgttacataagtatagtctgttagtacagtaggaaactgtgatgactaaatagaacattttaataacaaaacaggacaatagtttgacataataggggattgttatgcaatgatatggcacagtgagttcagattgggatactgtgttaacacaataggacccaatgattatgcaatagtgtaacatccttcttatttttttcctcttcctcttcctcttcctcttcctcttcctcttcctcttcctcctcctccttcctcctcctcctcctcttctttttcttcttcttcttcttcttcttcttcttcttcttcttcttcttcttcttcttcttcttcttcttcttcttcttcttcttcttcttcttcttcttcttcattgatacactgaaattatacaatatgcacttgtatctcccaatatggtgctgtaattgtattttagagcactctaataacaaatcagattgttatatgatgaaacatggcatagtgataacataagggcatttggatggtacagcagaaatcttattagaataataggacagtcagtcatggtattataaggtactatcttgtcatttgtgatcactataaaggaataattgggaattttctaaaagtaggacagtgatgtattttcagaatagagaattttagtggattgattgagaatactctctgtaaatgaattgtctccataactgggagggacctatggctccagccacatatgtagcagaggatcatcttgccaagcaccagtgggaagaaaggcctttggtcctgtgaagctttaatgtcccagtgtaggggaatttgagggtggggaggcaggagtcggtggggaaccccttatagaagcaggagaaggggaatgggataggagttttgagggaactggaaaaggagatagcatttaaaatgtaaataaagaaaatattcaacaaaaaattagaaagtggaagaaataattgagaaagcacctgtcatggcactagacagagtcctgtgaaggtgtgtgtaattggtcattgtgatgacatacatggacaaatggtttgcaaaactcttcactgtaatggctcactaggacactgtgatagcacaggatgttacttctatgccacagtaggatacagtgatgttataataatgcactgctataatacaatagagagcagtgacattacaatgtgataacaaaaagctgtgatgttacaatagggcactgaagtgatgcagtagtatgttgtactagctcagtacaacactaggataatccagggtcatttttacccatctagtactctgctacccactatgatggttaaggatacaccctatgagtctataaggaacttgtcaaattaaatgatctgttttttaaggtgctatggatatgtgtcctgacagcaatagaacaaatagacaagcacatttgtggcataatagaacactgtgaaaatataattggccatttttttttctaggataaggctgattgtggttgtacaatagttcagtgtgatgtgatgttgcacaataaattaatgtgtttgtaaaaaaggtcaatgatggcacaggtgactactgtgaaggcacagggagaattgagttggtaatataaagcacttagaagaaaaattggatatgttgatgtaatgttaatttttatgggaaatataacattgtgacatcaaatggcacaattttggcactatcaaggtcagtgattttacagttaatattttttggcaaaatgtacaatgttgatataacaatacagcaatataacaagttaagcaatatgactggtatggaatagcatgatgatgatgccactgaagaggactaatttggcacatttgggcactgtgatagcacaagagaatcctcttaaggcaaaataggaactatagtattatatgcatgtatgatactacgatagtatgattatagtattatagaatatattatagtactgttgtatgtattatggaaccataaaaacacaacagatctctttaacgtcataccagtgtaatgtcatttcaccagtttaatgtaatgaaaaagaaggtagctatgacatcacattaggacaatatactgacacagtagcaaccagtaatgtcacagaatggcataatattgtcacaagagaaccctgtgatgtcacaatgcagcattgtgatgacatcacaataagtcaattttacatcatgataggacactatgagtacaaataatggtggtgtgatgccaaaagaagggactatacttctataataggacaccattatgtcacaataaacatgatgatgacacaaaaaggcatgatgatgatgcaaaacagcactgctatgaacaataaacaactgtgatgaaataatagggcactgttaaactgtaggacactttaatgtactaataaggcactgtgaagacacaatagggtcttttaggtcacaataagacactatgatgtcaacatagggcactgtgacagtacagaaggatactataatggcacattaggactctgtcttgacacaatatggcatcttaatgttacaaggtaacattgtggtaccaaaataaggcattatattgccacaatatggtactgtcttgtcaaaatagggcacttttatttcactatatggcacagtgataacccaatagaacattgtaatttcacaatatggcagttaaaatatagtataaaattttcatgagacagaagaaaattttagatcatcatttaattcaatttagatcacaattagggtatgttgatcataaattaggacacagtaatgacataatagggcactgtgatagcaatataagttactatgatgaaaaataatttactttgatgaaacaataaaagactattatgccacaataggggtctatcatgtcacaataggaaactttggttgttctctatgtatttttatgcaaatcagacattatgatgacaacacacagggtgatgacaaaaaggacatttgatttgtaaaacaaagtctgtgttagcataataggatttagtcatggcattataggtcatgtatctaagtctatgaagatgtacctgaggctgtttctatgcctataaagatagaaccgtgaagaatttctctgaaacgataattaaatgggtctacagaataaggcaaatttgtggtttggatgaggatgaaccccaaagattattttaaattcttggctcctagttgtcagaaacatttggaaaggattagaaggaaggttcttggaagaactctgtcacaggaagtaccctatgaggtttcaaaatcccatgaaatttctaaataactacctcatttaccccccccccttactcatctccttcttgtatgatttggttgaatatatttattgaccctttgaactgagaatctttgctctcttctatactaactattcttacgtttgctcttttcaaatatgtcctggatttcctggatgttttatgttaggagctttttgcattttgcatttctttggctgttgcatcaatgttttcttttatttatttattttttatttatttttttattacatattttcctcaattatatttccaatgctatcccaaaagtcccccataacctcccccccccacttccctacccactcattcccccttttttttttttttttggccctggcgttcccctgtactggggcatatacagtttgcgtgtcaaatgggcctctctttccagtgatggccgactaggccatcttttgatacatatgcagctagagtcaagagctccggggtactggttagttcataatgttgttccacctatagggttgcagatccctttagctccttgggtactttctctagctcctccattgggagccctgtgatccatccaatagcttactgtgagcatccacttctgtgtttgctaggccccagcatagtttcacaagagacagctacatctgggttttctacgatatcttcaacacctgggattctcttctttatctctttattttgttagtgatgcttccatctatgactcctgatctctttcctaggttttctatctccagggttgtctcctttcatgattttttcctatttccatttttagattctatatggttttactcaattccttccttgcttggttgtgttttcctgtatttctttgagggaattatgtgtttcttctttaagggcttctttacctgtgttctcctgtatttcttcaagggagatatttatgtatttcttaaaatcctctatcatcgattttaaatcagaaccttgcttttctggtgtgttagggtatccagggcttcctgtggttggagaactgatgatgccttggtttttgttgcttatgttcttgtattcgagtctcaccatcacttatatctggcgttagctggccttgcatctctgactgtagcctgtatcttctgtgagatgtgagcctgtctgtgtcaagctttctatgggtgagttccacaggacaaatgaaaattggcatggtatgttcattttcattgaattctaaaaattatttaatttctttatttctgtttttatccagtagtcaatttgaattttttctattgtttctggtgttgataacctgcttaaattcatccctatctcatagaatgcctgagttatatattttttcctttttatttatttttactttttggtaaccattgataattattttgtgtctagtatgtggtttattgtggagtaagtgccatgaggtatcaagtagctatattttttttaaaatattggatagactgttaagtatatatctgttaggtagttttaatttaatttaagttgtagtaatgtttcttttaaagagtgggtgcttttgtgtttgggttatagatattaagaattgaaatgccatcttggtggatttttgctttgatgaacattcaagattgtctgatatatcttttgattagttttgatttgaattctattttgttagacattaaaatttttataccagattgctttttagatccacatgcttgaaatatttttgaagcctttatcctgagctaatctttgatgcttaagtatgatttttttttttgtattcaacaaaaggatgtttcatgtcattgcatccatcctgttagtctctgtcattttaatggggaattgaaacattgatattaagagatatcaatgacaaatgattgtttattcctgttattttgttcctgtaagtattgattggtgtgtatgtgtgtgcattttttttctgctgatattagtttactattatcatggatgtagttaacctccttgatttggagttttcattgtaacacttttggtaaggcttgttttaaaattagacattgtttaaatttgctttttcaaggaaaggaatatcttattttctgcatctgtgttaatttaaagatctaggccaatatcagtggtctcttagagtctctggcatatttgttcaagtcctgctggctttttactttttttttttttttttaactttccactgagaagtgagatgtaattctaactggtctgccttactattactttatatctttcccttgattgtttttacactctttctttgttttctaaattttgtgttttgatcattatgtgaaaaggaactctctctctctctctctctctctcggtttgatttggtattctgtattcttgtaccattttaggactctcctgtttggttaggaaggttttttatataattttattgaaaatattttataagcctatgggtgggaatttctcttcttctattcctatttttgttggctttggtctttttctagtgttccagatttcctggatgttttgtgttgggaattttataaatttaacatttttcttaacacaatctcttgtattctgatggtgatgtttgactctgtagtcctgttcatattcccaaatttttcatttccagaatttcctctgtgttttcttcatagcttctactttcatttttagaccttgaacagctttattagttttgtttttgtttttacttttctttctttaaaggatttattcatttcctccaattgtttgtttatatttttggatttctttaagggaattattcatttccagttcaaatacctctgtcatctttatatagttagttagttttaagatctttttcttttgtttcacctattggaatatttcagacctgctttgttaggataaataggctctggtggaggcatattgctcttgctattattgtgtcctaggcatctatgtttgagggatttcagggctaggtgatgatttctgagtttatctttgctatgcattatatatatttttttgtttcttcatttctgcttcctcactagattttcagagagttgagtgttggctgtatgttattggtttactggtctgctctgcttgtgtgttcatagagaatgcttgcttttattggagactgaaggaaggggaggccagaaggagattgtctgttgcagctctatgggtatccctgaggattgaatatggaaaagcagctagcatgatgaaaatggctgggcatcctacctgatcatctggaaggagtggcctgtggttatgtagctatgtcttcactagttaggggatagagcattgtgatgagtatggagggggggcagggaggatggtctgtgggatcaccaaaaggtatgcataaggggaatgtaaggctgtagatggcattgtgttacagcattaggagtgattctgaggattgggtctgtgtgaatagacaaagtggagaagatctgtaggtagcttacctggtcttctgacaggtatgacctatgtttgagcaggaattgtctgcatcacttcctcacttaggggcccagtgatagcagtgaggggggtggggaggctcgacaaggtggttgatggaatccacagaaggcaagggtattgctatcttacaaataggaacttaaatctcattgtagagaactgtaatgtaacaataagatggtgtaataacgtaatatggcacttagtaccacaaaaagtactgtgataacagagttgtgaactgtgatattattatatgacactgtgcatatacagtaggacagtattatgatatgacatgttcctgtgatatctcccataatactgtgatgactcagtagagcaggatggtgacattgttgggcattatgttaatataaaagatgattctgatagtacaacatatataaatattgtgatgccaacttagggtacttcaatggaaatgtacggcttcaacttggaaatgctatattgtgccaaagacttagactttggcacattagagtattgtgatatcacaacttggaactttgttggcataaaaatgcaatgtgatagcaaaattggagattcctctgatacagtatagcactgtgatattagagtaaggcactctgatctcagaataggttttgttgttttaacacaataagatagtgggatgacataatagaacaccgtgatgggtattctataatcactatgcttacataatttgtcatggatatgtcatactgaacactgttatcatacaacatgttccttggatgtcataacaaggcactgtgatggtacagaagagcagtatgataatataagtgggtattttggtgatggcataatagagtgttgtaactccagagtagggctttgtcatatacctatatggcactgtaaaaaagcaaaaggttctttgacacaatatagcattgtgataatatagcactgcactgtgatggcataataagtgaatgtgatggcaactggcaatatgcaggttctgttgcacagaagaacactttgatagtacaatagggcattatgatgacacattatggcattgtgattttaccactgatcattgtaatgcataccaggtcagtgtggtggcacattaggacagtatgctgttataatagagctctgttgtatcagaatggatctctttcatgtctcaataggacattgctatgtcatattggggcactatgataacacaatatggaactatgatgacataataaagcactgttataatgacacaaaaagattctgtgatgtcacaaaaggacattatggtgacacaatagtgaactgtattgtcacaacagttcactgttatagtacaatagaacacactggtgatgcaataggacttggtgagggcataatatgacattatgatgacataatggtgtactgagatgttccaacaagacattgttttagtgcaacccagtattgtggtggcagaatatgacattgttcacacttaatgtggtattcccttagcacaatagagccttgtgactggacaggaggacaccacgatggcccagtagggcactgtggtaacatagtatagcacgcactctcagaaatccaagctgtgcattagtagttgaattgaaagagagcaggttctatgttgcaataacaaattcagtaccggctctttcatggttttattctaccattctctagtacctatgaacagtgcagcagacaaatgaaaatattttttgagaatgcaaattgttctgaatcaatcatggtgtttgcttctgtaatttacagagaaagatgatttcaattatattagaggtagtcttaatactatgctttgtcagtgcttttcctgttctagttgggctttcaattgctcagatgaatgaaacccaaaaggaagttgaaaaggaaagggtttgtggaacttacaccttgcagtacatcatccaaggaggtcaggccaggaacccacggtgtgttaatagaagtaggaacagatgcagaggctatggagaagtactgcttactggtttgctcatcctacctacttttggttgcatccaggagcatcaggtcagatgtgacagttattgcaatgagcttggtcctctcacgtcagtatgaaagaaaatgtaccaccaccatgtccacagaataacttggtagagacatctcaactgagttttcctctgctccccaaaactcttattttgtgtcaagtccatataaaactagcaatataacttccttagtaagtctctctcagtttgaaacatgacacaggaagataatcagagacctaaagtgaatttttatggttggactcagcaaatttactataaggcaaattttaaacccaactttatcactttatgaggtacgagcttctgtttcttagtatttgtgtgctttttcttcgtatttctttgtatttgtgagcttccttcgctgtgttaaaagaaaccttcagagcctttgggaaaaagaaaaaaagtcttatatccagaaagacatttccctgtttgactcattgagagaagttagctacttctgtatgtcacgtctgttttcaatatcatttgtttccaagcatgagtcctttagtaagtgtaaatgcaaagctatcagtaacaaagcttgtcttagggcatgaaaaatcaaattttaacaatcttaaaatggaattttctcactgcacttattaggagatcttactaataagttaatattggatccagtcataccacagtctgaattacaagcatgcatttctgagcatttgaaaatacttaccatccctaggcaaaaacaagcctaatagacagtttgaaaaatcaaagttttctgaagacagaaactgagtttcatctttttagcagagaaaggtgttttttcctgcattatacatatatccttaataaaatttgggggtggggtggggtggaggtaattctttgatcagtaaaattatacttaatattagctgtggtacttacctattctaggagttgacaaagattcttgaaagcctaggctgacatgtcacagtttctttttctgtgataaaacactaaaaccaaaagcagcttgtggaagaaaaggtttattcatcttgtagcttgtagggaagtcaagacaagaacttagaaacagaaacagacacagaggccatgaagggatgcttcatgctgcctttgctcctcggggctttttcaccctagttttttactacacccagggccacaagcctagggatgtcaccacccacagtaaggtgggccctcccatatcaatcaaatatctagaaaatgcaccacagccttgcccacagtccagtcttctcagggcttttccttaattgatgttctcattttcaaaatgacataaaactagattgtgccaagttgctataaaactagacagcgcaatttactccgtgtcaacctcataggcagacatatcaccactcaactagactccttcctttctcattgtctccatgcttttttcagtcatgatatcttcttgtacctgaataaatcctaacaaagtttgagggttttgatgttgcactcaaaaaggagaagttctaggggataaatcttatactcaatgccaccactgtctgcatagttgaattccattctctttgcgtatggtacacttgtgttgggaatagaaacctaggagtatctttgaccaatcaaggtgatctgaagctggtgaatgtgatctctttttaattcattggaagaagttagtttctgatatatggccccaggaatcctgtggacacattgaataaataaactagctcttactagtaaagacactgtgagtttaattgagcttttaaaataaatataacccttatcttgatcattgacaacttaagtcttacaaccttgaaaactctgctacatctctgacttatcagaagcatgggtgggtgcaagagtgctctgtggtccctgtgctgaatcctagagaacatgatggttacatttctgtttcattattgtagtcgaaggaatgagaattttagtataggtaataactttaatccaatcctggcttatatggtacattcacacaatggagttttatctgcccaggaaggaaactgaaatttgcagcaaaatgtctggaaatgggaacaatattaagcgagatacccctcactcagaaagacaaccattgcatgttctctcccatatgtatacctgggcttctactttatgtagatgtgtatcaatgtgaaagtgggcatttgtaggagccagtaaactagaaagcatcccatgggagtggaagcatgatagaacacatgtgatatgaaatagggagtaggtatattagggtcagcagaggagggtttacatggtgggtctgcaaaaactcagaatgtatgtaaatgcctaacagaaaacatctacttcataatgtaataaaaataaattgaataaagataagaatgagaaaaatcatgaaagtaatttaagctgctgaagagcattaaatatggcttccatgatctcctgctcacattcacttttatacagtgtttgtttcatgatcaaaaagcctttctgtaatggaatttttaaagatactttttttttggtaaagcctttccttacaatgttatgagctgtatttatgacaggaaagttagctatttcatagctcctgctcttaacactgtaataaaaataaagccttgcaaacaaaaaggtcaccattcactcctcttaaaagtgtctctagaataaacgtggatgcaagctatcaccaactttcaaaagaaacaaacctttcccatctgtgctgtctgcttgctgtgtcattgtcattcacaataaataccattaattcaaactacttcctccctgtttggttttcctcactgtttaagttgatggcaaatgcataatcccattttaaatattctctgggccataaaatgcatgcaattttatcaatttgtcagtttaactgcagtcagagaaagctttgatgtcctgagtcgccaactcttgtgtaagcagaattactgcatcatgaggttcctttttcttgtgagtataactctccttgacatgaatcctcacagatgtcttaggtaataactgatattcgaagaagggaaaaaatgtaaaaattagctaaaggatgaatgcactgatgtgatctgatatattacatcatctttctaacattgaaatctctcttgactttggtaatcacaattaactcatgcatagtcctgtcaatggatttttggatggtagcttcaatgatcctgtagaaataaatcttttacacttgatttagtgcagaagccaagaagtgatagaacacgaatcttcagaaaatccagagttgtgcttgagtatgagctccgtgcaagacattattcagaaagattaactcctgtaacagacagatgtgggttcagattaggactctgtttctcacttcaacattcaatgttaattttaagctttaaagagcctcacttaggattatagatattatctatttccttaggttgacttaaggatcattgttagaacaggaatatgcttctgtagtaagccttggcttattcagcccagtgtttctggagttgtaaggtacagagctcgagtcctggtcatcctgataagccaaattcagccatccagtctcaatattcaaattagtcctacaagtaatggagaaaatcagagaaagagatatatgcaataccgtcacactagaaggacaaacaggttcagtgactcccaagtttatctccaggttcctgacatgaggtttaaaaaggttaaagtaatggataactgagtagccatggtcaaggtggagaatcttccatgggttctgacatttttgcatccaggaacaagaagctggagggcaaggcatagatattagccagatcagaaacagatacacttccaaataggaaacaggctggatataagagaacatttggaaacctaaacagactcattgtacaaagcatttggggcttgtctgttgcatatcatgctttgttaaggctgttgggattgcatgaaatttggtgctcatttgcataacatggaatctcttacaatgctctgtctaattacttcacataattctacatacgtcctcatgtgtgtggtttattattatcataaaccatataggtcacctgtagtttgttggtggctctgtgccacacaagtgggatttgggtggcattagccagcagtttcagcttttctcttttctgactcatttctttcccacattaatttacctgcctctggctaagaattcatcaaacaatccttgactccattctactccactgcctcattaaatgtaggtggctacttactacattactcctcaatttacagtttgatttgccttgccctttcttgataagacaatttctagactagtaataaaagactcaaatgctaaagtatactagaaatatgacttagttgactttaactcttcctataggattgaggtctctggggccttccttgctacaagccacactagcatttatatgcagtggtcttgtacagctcacctctagccaggcatgtcagcgagactttatgaactcagtttctggtcttactgaaaaagaaaatttcacagaaaactgtctgattctcgtgctcttgtgttctttttgctcccacttctacaatgatctcgaagcccaaggattgggagttgtattgtatatgtgatcctctggaacagggctcccccactttgatgtttaaaattggttttctgtaatggtctctgtctgatgaaaatccatgtaattatattatatctcaaaataagaaaagaaatattttttaaaagaatactgtttaaaggtaggaatgttgttgaaggaaagataaggagtgagtttaaaatggtgtctttcagtagaagtatatttagttaaatacacttctcactgaatatctactttttccactgaaccagtgttttacagagggaaggagagagggagtatataaagagagagaagagagaaggggttgcagaagggaatgagaaagggagagagagagagagagagagagagagagagagagagagagagagagagaatgaaagattgtcttagagtttcactgctttgaacagacaccatgaccaaggcaactcttttaaacactatttaattggagctagcttacaggttcagaagttcagtccattataatgaaagcaggaagcattgcagtatccaggcaggcatggcacagaaggagctaagatttctacaacttcatctgaagctgctagtggaagattcccttccaggcagctagaggagtgtctgaaagcccatgcacacagtgacacacctactacaaggctatacctactccaagagggccacacattctaatagtatcacctcctgggccaagaatagactaatcataatagacatagagacagtatttatataagactttcttattctctatactctatattctactatgagtataggaactcaatctaattctagaaacttatacaacaacttgtatttgtggtcattgcaggagaatggaatgccctgcatatgcattgtaaaataaaaggacatggaacttacaggaagaaaatttaagctctgcacaagtcctatattctatgttatctttgaaacatttggctttgtagcacatatagataggatcaaaactctctaagactattcaatctgatctaacttttttattatttattttgaaaacactgcttatggttgactttttttaaaattaggtattttcttcatttatatttccagtgctatcccaaaagtcccccatacactcctccctactcacctacccacccactcccacttcttggcactggcattcccctgtactgaggcatataaagtttgcaagaccaatgggcctctctttccactgatggctatctaggccatcttctgatacatatgcagctagagacccatgctccagggggtactggttagttcatattgttgttccacctataggattgcagatccctttagctcctggggtactttctctagttcctccattgggggccctgtgatccatccaatagctggctgtgagcatccacttctgtgtttgctaggccccggcatagtctcacaagagacagctatatcagggtcctttcagcaaaatcttgctagtgtatgcaatggtgtcagcgtttggagactgattatgggatggatccccggatatggcagtctttagatggtccatcctttcgtctcagctccaaactttaaagaacagtcagagctataaactgaagataatttccaagtaatcttccctcatgatatacctgcagggagagaaaaaaaaccatgatgtaattggctacaattcagaacacacatgtatatttccttttcttcaactcacatgaactgaaaagcagctaaaaaattgtcttttttttcatttttccctaagtgtatatgtgatatacattcatgcatatgcttttgtcagtgtgtgtgtgtgtgtgtgtgtgtgtgtgtgtgtgtgtgtgtgtgtgtatgtatatatatgtcaaggcccaacaattggtgtaaggaattattctcaatcaattttcctttgtattatttaaggtgggaactctcttcaatccacctggctctggggtttcctgtctttggcttctgtggcaggaattgtagtagggctaccaagaccacctaccatttatatatgtgctgaaatcttgacatctacagctaaaatttccatggttttctgtggatttaaactctggtcctcatagttacacagcaatacttctcataattaaagcatttatctggccaccaaactcagtattttaggttccctcataagtgctggtaacctttagactagctattatagattgagtccaacctccctggctctaccaactcatgcttcaggcattactctgcttatctgttttgctcctaatgttaagtcatagaaaatgttgcaagattaatgtggggttagaaacctggacacattgctgttgatcagtggcagggtgaattgcttctttgcactactaacagagttcacacatttatctgctcttaagagcaattgcccagtcgacaggttgctttggtgaacagaactttcagagataaaagatgttgacagaggcaggcacatttctcatttctttgtcaggtttaatggttcatctacggttttaagcttgaagtcagtgctgtctttggcagaatatatgctaaatttggaatgatgcagataatatcaccatgcattaccaaggacgacatgcaaatccattgaaaatatcttgaaattaggggtaagagaagtggctgagtataaagtccttgccgtacaagtataaggagctgaatttgttctccagaacttatgaaaaaaatagacataggaatctctcagtgcttacacattctggcttcttttccagaggatgaaggtttgattcccagaacacaaatagtggctaatagacattggtagatttagttccaaggtatctgacacccctctactggtatccatgaacagtgtgtacagagtgtgcacagaaatatatttaggcaaaacattcacatgcatacactaaaaacaaatcacttaaaaaacagctagacatggcagagtttgcctgtaatcccagttctgggaaaatagagataggagaaaccttggggctaactaggcagagtagtttaaaagcctcaaaacaaaagcaaaaagtcaacagtaataaatcatagatgacaactgaggaactagagcctcaggtcccaaagggctatatactcaacacacacacacacacacacacacacacacacacacacacacacacacacagagggaggaagagagacagagacagagggagacagagagacagagtgacagaatgacagagagacagagacagagctatgcacatatgggggttaggtagaataagaagatgcattttctagctaaaatcttgcaaaaaatagcaataaacatcttaactggcatatttcatatgtcttgtgttttccctaatagccaatctttagtgtgcattaagatcaattctttacagaaaactgttattgattactctattcttttttttatttcagatttttcattactcatttaccgcttcatatttgatttacaacatacacactgggtaagttctttggttttctacattttatgagccattgtcacactgagttgtcacagatatcagtttgttcatatgaaaatatttacatcttttcaagggaagtgtgggagttgaatcccccagaagttgaggactcagtgttgcagtatgcggcctggggtgtgcaaggacagcagctggtaagcttgctcaaccccagaccctgtacaggaggccaaatgtcaaatctttacaaagctcatttcctcgtgcaatttatcctgcaatccttgacgtgttcctctacattatttaccttgcatggttccctaagaataggtgaaataaggattgggaggtagctcagtagggaaagcacttgccaagtaccataaggacctcagatttaactattaactcagattgtagtaccaattaaaaagctggttatgatggtttgtagatactcgcaaccacagcacaggagggtcctttgaacttcctggccagtggatagggcccacttagttccatttctcttaaaatatattttcttaaacaacggtgactggaaatggcattcaattttgacctctcgcttactgtacatacatgcatgtacattcactgctacannnnnnnnnnnnnnnnnnnnnnnnnnnnnnnnnnnnnnnnnnnnnnnnnnnnnnnnaatataatcaaataatgtttaaaactatttgctatttgtccaatttaaaaagtgtttagcaggcactgtatggtcaaagttgtaattaataataaaaacagaacaaataaggttaggatattgtcttacatccacacaactccccctacctaccattgtcaactattttgcaaaatttattttcaatttctatactcctaaagtagtggaaacataaatattttacaattatttatatatttatatatgtattttgccattgttttttatttgattgtttgtttggttcgttggttggttggttgattggttggttagttttgagattggggctcctgtagcctaatcttgtcttcagctacctatgtacacaagaataactgtgatcatctgatcctcctgcctttacctcctacatgccaggatcacaggcatgtactaccacatgcctgtgcaatgatacctttgtgaaatcagaagacaacttgtgagactcatttgtctccttccattatgtgagtctcaagaatctccctctggtcctcaggcttcgaggcatgctccgtcatcctctatccttctctaggcacaaatgatactaagtgctttacttttgttttttattacaggcatagaagattgtagggttctccaaattctctctattccttacctaatacacttgataataatattttataaggttaatttccatttctgttgagatgtcttttttttaacttattcttttaattcatggaggttcagaattggtgttaacattcaattgtattgtttagaagcaagtccatactttgaatgtgatgtgatttgcatgctttttgtaattaatacaaattttcatgaatgtgctgtgtggagtattgtgtagattcaccgtgctggatgcttttctctactgagactgttagagcaatatccataattctgtccttattcaagttcccttactaagaatgttgggtgtctgacatttttttttgggtactgacagttttacatgatagaattgggctatgttttcaagagtaaggggatttaaaaatggcaattatatctaaactatgaaattgattttgtgatgatttaatcaacatgtatttatttacagacctaagtataacctttgaaatatctttaattgtgtttagaaacatctctatgttttaaaaattaaaattgatagttcaacattagccagatgggcttgaagtatgtttcttattttctgtgttcttcaatgtcttcattaattaaataaaaacatctgtaccatcatatcacgattcaaattttgaataatacttcatttgccataggccactcaacattgttgtttttagaaacaatttattataaatttaatctgtttatatatttaagtaatcacttctaatgctgcaagatttaaaagggtgacactaacaatttaacaagcaggctacagaaaagtgaatggttattggattttcattggaaataaatcatcaaatctttttttttagaatttaataaatttatattttcagtcagcagtaatcaatcacctgacatgtgatattcccttcatttcttaaatacagttcttacactactattagtacagtcaacatattgcacatcaaaactgattcagctttgaaatagtcaatacaaaacctacccccccaactagaaaactcaagccaaatgaaagcctcacctaacggcttacagcatgcttgaaatttgtgatcctattcagacaataaaaaaaatccagtggctgacttttttggatgccatagttctgcagatcaatcaatcagtcaatacacaacgataacttgtaggtagcctgtgttttgatggttgctgtctgctggttccagtctcctcatctctcatataacagatacaatgggcacgaaactctttcagtgcatcaaggcacagtacaagtactttacaagtaacatttgtcacattactgtgttgaatggaaaattccttggatcagggcatgcatcccccaccctcccaaaggagttattcactcctgttatattcttttttattacatattttcctcaatgacatttccaatgctatcccaaaagtcccccatatcctccccccccacttccctacccacccattctcatttttttggccctggcgttcccctgtactggggcatataaagtttgtgtgtccgatgggcctctctttccagtgatggctgactaaatcatcaaatcttaaagtaaaatgtcattgagatgggggtctatgtcattgtcagatcaggtgaccttggccaagacattatccatggtaatattttatgctcaccattgataaaatgaattcatttaactttgtttttaatcattcttcattgacaatactatgtcattttaagtatctttacattaaagatatgatttaaaagttttctatttgtaagcctgaggaaaatgaagaaggagcaataagactagctgggagaaaaatatgagagccacatcatttctaaagtcacagtgtgacacccagcaatattttagtatctgtgtagaacagtgccatgatacataatcaatattactgacagatttttatagtgatttggtggaagtatttattccctaaaatggaaactgagagataagtataatgtaaagtctctttggaatgaaccttgggtctactgaccagcaggtagcaaactaaccccagagatcttgtctctagctgcatatgtagcagaagatgtcctagtcggccatcactggggcccttggtcttgtgaagaatatatgccccagtacagtggaatgctagggccaggaagcgggagttggtggttgaggagcagtgcagggggagcatataggggactttcgggatagcatttgaaatataaatgaagaaaatatctaatcaaaaaagaatacaatgtattctcaatatgtatttactttattttctatttggcttatctttcttttcttttgaaaaggatgccctttgtattgtaatatttggttatgtctgtctgcgtggatacaatcacacacatatgggtgtaggtgcgagctgaggccagaagatgctgcatttacaggcagtcctgagtctcccaactcagctgctaagaactgaattcagagtgtctgaaaaggcagtgctcactcttaaccgctgtgctgtttctccagcccttacacttttattttctacctctcctctttcctcatcaccaaagtagagctaattgtagggtcctcccaatcatttctgtaatttaatatattcatacagatataacagactccaaataatacctgcaataagtaatttagttgttaaatactgttactttaaaactatcaaagagttactttacattatttaaattatgtgaggttttagtgccagtagcttcatggtaagtgaaccacagttcttagaaaaatgcttttgtaaaacaccaaaatcttttataaaacttttgaaaagaaatcagtattttccaaggttatcctgttgttcatgtaaacatggattcaaataacaaaaaaggcatgtacacacaaaggcctaatgatgcattttgtatgaaaggctttgtcaatatttgaggctatcagcaaactcagcaatataatttcatgacagatgagtcagtgtaatactttaattggttatggattcaataaattaaaaagttctgggttgtatacttacttcggaataattaatttctgatccttggttatgcagaagaagagaagagagggagttatctgatgtgtgtgataaagtgggcttacactggagcttcattgattgcccagggttttcagttgcattgtggtgagagaagaaatttggaatgtggcaaaagaatatgaaaatactttagaagcagcaaaagcattaaatttctggggaatatagtgaatacaaacagcactttatcttcagtgagtgttttattagaagaaattgcatggaagaagattctggaaagagaggacataagaagcaacatcattctgccttcccacttaaacagccattacacgagtggacatgcaagtattcagatctccaaagtataaaagttttaacatccattagaatgcttaggtataaaactgttattaatttcatttgatttctgcttttaacaggtccaaagacttcttcctttttagtggcaggcaggagtatatgtgatttttggtgtatgccaggagcatgtgagagccatggtgagcaatagcacctgaaatccacctaaggtagttttattcttagtgctaaacattaaatggatttcaggtgctattcctcacaatggctctcatattcttagtgctaaaggccacttcaggtttggacttgcatataccaggataggtggccatcatttcaagctcttcaccatcactattgcaagtcctctgcactgccaagttaaacttcaggaggattaaagaacactcgacctttcaatattgggctattaggttttgaggagggccagctatacaggctagttgtagaagacagggattttaagaggcacagaacactaatccaaaagatttaagccattgccttaagtggtggattgagtgataatggtccccaaaggcttacaagtctgatacttgagcctagttggtgggcctgtttgagaacagcaggagttatagtcttttggagaaagggtgtaacttggggtaggctttaagctttcaaaagccaatgtgttgtggtttgaacaatagcacttgatagggccatatatctgaatacctagtcatcagagagtggtactacttgaaaagaaatcaaacttatcactgggcaactattattagtactaagttgtgacctgctttgattcttcagattcagtggttttgaaccttagttcaagtgttctttttcatctttgtccaccttggtcaaatccactaaaaactaatagtttatggctctattttaagttacttgggggtcaataattttctctattatgttggttccttttctgctgttataataaaagcagcttaaagaagaaagtgtttattttgccataggattcagaaagatagagttcaaaatggtgaagaaggcatatcaggagtaggaagcagagagatcacattttgtctacatctgggaagcattcagagagaacatgaatcccatcctccaataatgttcttcctccagcatggttttaggtctaaatgttccataatttcaccaaatagcatctccaagcaggaactatatattaaaatataggagccggtgagggacatgtatcattcagtctcactacctattttgtattttaattctattccatttaactctgattttaaatgtattattcatttttagttgctagtttgggggttagttttcttaatggtattttaggttgaaaaacagaatttttgatctgagatcatattcttcttttaaaaaaatggatattttatttgcttacatttcaaatgttatgccctttcccagtttccctgctgcaacccctcttaacctgcttctatgaaggtgctcccccacacacccacccactcctgcctcaccatcctagaattcctctaatacactggggcatcaagttttcacaggaccaagggcctctcttctcactgctgacagataagcccccttcagctccttcagtcattcctctaactcctccattggggtcactctgctcagtccaagggttggctgtcagcatctgcaactgtattgttcaggatatggcaaaagaagccaggagacagctgtatcaggctcctgttagcaagcacttcttggcatcagcagtagtatctgcatgtggaatggatccccaagtggaacagtctctggatggcctttccttcagtctctgttccactctttgtccctgtatttcctttagacaggagcaaatctgggttaaatttttggatatgggtgggtggccctattcctcaactggggggccatgcctaacctctgtatatggtctctataggttctccctccccattgtcaagaatttcagctaatgacatccccgtggggtcctgggaggctcttgcattcctgccatctgtgactttctggttacctccagttgcccattccccattgctacacacctctgttcaatttcctgaccctctgtacatttgctccatctcctcccattcctgattctgctcctctttttccctgctccctcctctcttattcccatgcccctcccatactctacttcccttgattacattgtccccattctaagtaagtctgaaccactcttttgtcttttttcctcttaagcttcacatggtccatggtccttgagttttattgtgggtatttcatgctctttgtctaatatccacttatcagtgagtacataccatgtgtgttcttttgtgactgagttacctcactcaggatgatattttctggttctatccatttgcctgtgaatttcctgaagtcattgtttctaatagccggatctgctaatgagaaacttaattaagagcagggcttaatggcacacagctgtaattccagctctcaaaaaataaaacagaaggatcaagtgttcaaggtcaaactgaactacatactgacacccttttaagaaaggtattagcttttgtttgattcctcaatgaaatttcaaagactatgagcttaacaagaaaaatatacttttttacattccaaagtttatcaactaaaatgatggagtatgaaaagtaagggagagagggcttggaatattggaaatgggagagtagataggagtagagattacttgcttgttcttcttatatggtgtcctatgctactgttttatttatgcgaccaagcaaaatggccaatttaactaataaaagaaaacatttaatttgaggattttagttcaaagggtttttatgaccatcatggcagggagtggggcaataggcaggtatgttactggaacaatagctgaaaacttacacttgatcaacaagcatgaagcagagagagagagagagagacagacagagacagacagagacacattgagagaaacagagagagacagagagacagaaagagacagagacagaggataccagaaaatgggaatggtatggtgtcttagtcattgttctattgctgtgaagagacaagacaacacttgttttagaaaaagaatttaactggagcttgctgacggtttcagaggtttagtttattatcatcatggagaaacgcatacacaggcagacatggtgctggagaagtagctgagagatatacaccaggatccacagacagcaggaagagaagagacactaggcctagcactatgacatacttcctccatcaaaggattgaaattacagacaattgtaaactagatttgttgggtaatgggaattgaaactgggtcctctggaaaagagaccagtgctcttaattgctgagtcatctctccagcccttgagttttgatattgctaaaagactgctccatggtaggtggcaccattccttgtgttgggctctgaactctgtaataatgaaaaactagctggcaacaagtaacaagcagacggtgtagctgtattcatttctttctactactctttactttgagtgccttgtcatctgggaaattatggactgtattttggaattacaagccaaataaaacctttctcaccaaaggtgctaggtcagggtattttaccacagcaacagaaataaaagaacttgagctatggaggcactgaaaccaagaacatcttgacatgaaatacacattgtgaggtgttcagatggttctgagggggaaaattccttggaaggtgtcctttagttttagatagcatatacatttgcatgtttctggactggaaagagattctcaggtaacagaaaaaaatagaaatgaggtatatgaacacatacattattattttgttaatgtatgtgtttgtgcacatgtataaacttgaatacacaggaagatataaaccctgagtattggtccctgagttttgtttacctttctgtctatctgtctgtctgcatgccaatcatctctgtctctgtctctgtctctaactctgtctctctgtctctctctctgtctctctgtctctctctctctctctatatatatatatatatacatatatatatatatatacatgtatatatatatatatgtatgtatgtatatatacatagttataaataaatagttatatatataaaactatgcatgtatgcattatgtatcatctgctccagaaccttactgagtaaacatcaccctagctctttgttaagatgctgaataggagaatatggtaactttgatctacccctgcacaatgtgagaggatgaaaatgaaccaaactgagtaattaatatgagacatttcttcaaattgacaccagatgtaactgccatggcataccagcatgagtgaaagcattttaggtaattttcaataaacctttgggttacttagaaataatgaagcaagtgaaataatcatgtttttttatttggtttcctaccacacactgccaactctctggcctctctcattatattctgtccctcatataaattcaatagtaaattgaaggtgtttcagcaacgtagcttttagacttataaatcaaggtcatagtcattgaagtgcatacatactttgcatagctgccactaaggatgtcatttagatggggcaaccatgtaaatgataactatgagcatttaataccagctctttccacatcattgtaagtgttgctaactgttattcttgcaactgactatacaaggttcttgcataatgatgtcaagactggggcagtcagctgtctaaacaataacataagaatatgttttgtaagatgagctcttttattatatgcagttcctggggtgaaaagatctcaatttggagcaattcagcattttaataagttagtaggttttgagaaatggcatgcagagaactccttgaaggacccattgtctgcatcagtgtcacaacccattccccaggaacagctccatgtgtcattttaactgggagcttctttccaacaaggaaaataaaactgaagatatgtgtacttaatgatgtcattgctatgtctcagccctttgtcatcttttcaatttcttctcagaatacagaaaaaaggttttagttatgacattgatgtggggagagcagtggggaggaaactcaaaccaaacaatgcacaaatgacaaatgccatctccaagtcaacaggttcatatactaaaagagagagcactgcaaggagggagggcattctatccacaagaagaaaagcaaccaaatagaggtggaaggaggcatggagaaagcttgtcagagagtagaagagtgaaagtgtacaaactgtaataacattatgacatttcaattataattaagtatgtaggagtgttcttgccagtatgtatatgtatcacatgcatgcctactgtctgcagaggcctgcataggacatcatgtctcatggaagtctagttacaagcttctgtgtgagtgctggatatcaaacccatgtcctctctaagagaaacttgtgctcttaaattcttgaaccctccctggttccttcagggtcactcaagagaataatttctagtctccaaaaatttgtgttgtttctgtagtttatcttatcactgatttctagtttaattgcactagaactgataagatacaaaagattatttgtgcctttagtatttggtaagatttgtcttgggaggcagattgtattttaccttggagcagcttccatcagatgctgagaagaacatagattttggttctgttggctgagatgttctgtagctatcttttaagaatatcttatctttggtgtagtttagtgctgaggtttccttatcgattttcagtttgaatgacagatctagagataagagtgttctagaaaatcatccactatttttgtatcattatctatctgaacttttatgtgcactactaattattttataatagaaaacatataaaaattacatgggaaaatatacaaaatgggaatttaaaagtaaacataatctgaaacttataaattaatgatattagttagtaatgtaaatatttattttggggggatatgatgtgagaaggtaagtgaatttacaaagaatttgataaatatagccaaaatgaagtaactggtacttagagcagccaataccccaagaaagaaaagaaagaggacaaacaacaaacaaagcccagtgcaacctgtctcctcatgattcagactatacagcatttttcttgtctgttagacaaatttcattaaatatgagagaattgaaatcacacagcatgtgctctacaatcataaatgaattaaattagaaacccaaaccatcaattgtatatgtgcacattcttactgagctaaaaatatactaggcaaaggaatatctgcatagccaagtgtggtgactcacagctatagtcccagtactgggtatggtggggtaggactgaggcagtagggctacaagaaatttgaggtcagcttatgatattatatatatataatcaagtcagtcaagggtacagaataaaactgtctcaaaaataaaaccaaatatccaaattaaataacacattataaagaaatttcaagcccggttgatatatgttatttatgtctacaaatatataacaagaatttaagatgtaatagaattacccaagatataagatacaatttgttaaatgcatgaaactcaagaagaacgaagaccaaagtgtggacactttgccccttcttagaattgggaacaaaacacccatggaaggagttacagagacaaagtttggagctgagacaaaaggatggaccatctagagactgccatatctggggatccatcccataatcagcttccaaatgctcacaccattgcctacactagcaagattttgctgaaaggacccagatatagctgtctcttgtgagactatgctggggcctagcaaacacagaagtggatgctcacagtcaggtaatggatggatcacagggcccccaatggaggagctagagaaagtacccaaggagctaaagggatctgcaaccctataggcggaacaacattatgaactaatcagtaccccggagctcttgactctagctgcatatgttatcaaaagatggcctagtcggccatcactggaaatagaggcccattggacttgcaaactttatatgccccagtacaggagaacgccagggccaaaaagtgggaatgggtgggtaggggagttgggggggtggataggggacttttgggatagtattggaaatgtaaatgagtaaaatacttaaatatatatatatatatataaagaattatgagtataatatcaaaacataagtacaacatttcttcttgataaacagtgtggggttttgttgttttttagatagcaaatgaattcagagatctgcctggctttgtggctttgtaagcacagacaatatactagctggctgggatcttgctctgcaatcaatatttcccaaatattttcatttctcttcttaatatctggcttttactgtagctgcccttgttttgttaggttcataaagcctctaatataattaatattgcatccttatatttcgtagagttgagaaattatatatatatacacacatacacatatatgtattaactgatgttttcatagttctttcccacagccttaagggctgtcctgaaggccacagtgtttcgcatttttgctaaggacttaagcgctacctagcctccaggcctcatgctgttctgattatcattgagtcattaatttttgcagaaaggatattcactagtaaccttagcagggaaaatatttcccaaaggaggaacattaaggaacattaagtaaagagtgtatatgtgtgtgtgtgtgtgtgtgtgtgtgtgtgtgtgtgtgtgtgtgtgtgtgtgtgtctcaggcccatcatccgtcaaccttcatggagacctataccctgctgactgtataccaggggaaggaatcatgtcacatcattttttccatgaacatgcacatctcagcaatgtacatgaatatcattctgcatatgtttggcagcaaaaggttgacatctggaatcttcagcttcacctaattttgagacacagttgctcactaaacctggaattcaccaatttggctaggccagctgtccattgaaacctagtgatcctcctatctctgcctttcaagccctggaattacagacacaggcttttgtgtttggtattatatatgtatgtgctgtgagtctaatatagatcccatgattctttttagtaataatttcaaggatggaacaacctctacaacatgagagttgttggtttattatttttagtgtgacttcaaaaatcaattttctttctattctgcatccctaatttcacatccactttctttattagatattttcctcatttacatttcaaatgctattttatatacataaaacatttagaaaaaattaatagggcatgtttggaattgctaagccaaccgggatgagaacacagatcaataacatgtattctgaagatcaataagaggtttaagaataagaactagtctggcaacagtagaaagctgaagcatatgtaacacataactggagattctgctagaacccatggtaaaaccatagcaagtatttctaactcagtgatggtgaaggtgaaagaggaagtagagccagtgaatgcctgaagctcactggcccactagcttagtctacttagcaaaggtgaaggtgaaggtgagatcttgactctataggaatattagtaactgaggaatgataccaaagattatcttgtgatttcacacttacagtatgtacatgtgtaccctactaattattgtatcttcatatacacatgcttgctgtctctcactttctctctgtacacacacatgaaaaaatactcatctatactttacacatatacatcacatattcatgtcccagaaaaatgctaatatggtttttcagaatctttaatgtgatatagctgataattattatcataaatgtgccactattgtagtagacaattatgaattttcaatacttccacattttgcttgagtttaatttattgatacagggttcttcagattgcaagcttcctggcaaacattaggttatgtagttaaaaagaaaaaaaaagactactgagaatttaggatatgttttagatatggtaattttgtctaacaatagatagagtcataaatctgtaaattatttcttatttttgttattcccaatacatttgaagagctgaagcaacatgtgaaaggtcttcctaaaagattaatgatgtaaaatcatttcagttttttctacagttctatgaacttttgaagaattgagagttttttgttcttattcataatgcttaagttgtattatcttggtagacaatctagttttaattatgcagctaataaaatatttattaagtaattcagtgtacctgatacccagtgttacattcaatggtcatgacctttaagaatttagctaataaatatagaaattattccctataaagaaataaacccagcacttgagactttaaaaaagtttgtttttagaatctgtaatgtgtttctcactctgtagaattcatctggaattaaagaatcactgacatacttatagtctggcatcaagaatgagggaattactcagtggggaagaactcttgctgtgcaagcatgagaacttgggtttgaattcccagtacctatgtaagaagtgtgactctactaatctgtgacaacattgctggtgtgggtggtgtggagaaaggaggcccactggggctggctgtctaatgtctagttcttgtgtcagtgacagacccttctgcaaagcaatagagtggaaagtgataaaaaaagaacatggagcatcctcctccggcctctgcatgtgcacatgggcattagcatgaaaccatgtgtgtgcatgcacacacacacacagagagagagagagagagagagagagagagagagagagacagagacagagagacagagagacagagacagagacagacagagacagacagagacagagagaaaggagagagagaccacatatatatatatatatatatatatatatgctagcataagtcaagggaagttagacaacactgaggtgttttttcacatggtaacaggtagatgacaatgggcttattcttttaagggagaaatagtagttttctcttttgaagtcagtttctattttccaatttggttgagtatagatctttaaagtgtgactttatgatcttctggatttcctcagtgtcctgttattttgctctttcatatctaattttgtgagtttctctctctctctctctctctctctctctctctctctctctctctctctctgtgtgtgtgtgtgtgtgtatgtattattatttatcatggggnnnnnnnnnnnnnnnnnnnntgtattattatttatcatggggtgtttcttttctggtctagtgtatttgttgtcctatatacttgttctatcttgataagttagggacttttttttttttttttttttttagggacaaactctttcttgagttttgaaaacattttcagtgccttagacccaggtatcttctccttcatctattcttggatttggtctttccatattatgccagatttcctggatgttctttctctggatttttttcttttaatttagatttaacattgtctttgacccagttaaccttttctttattttctctctagccccagttattctctcttctatcccttgtattctgttggtgaagcttacctctgacatttctgttctagttcctaaattcctcatttgtagttttccctcagtttggattttttattgactctattttaatcttgaactatattcttcattccattgcactgtttgtttatgttttcatagattccactaatggatttattaatatcctctttaaggtacttgaacatatatctcaatagctgttttgaagtccttgtcttgtaaattaactatgttacagtccttagagtcttctatagtaggctctattggtagcacattgttctaacacttattgatcttgtttttagtctaatatctagccatctgggtttgagatgattggaattctaggttctgatatctggccttgtctttgttgggtgggttgttctgttttcttgatttctgttgccctttctggtttttagagaaatatgatggctgtgggttgcttgctagtgcatgcctggtaagattctgccaggtatgggcactgggcatcaagtaaaatgtgtttctagatttgggagatgaaactgaggaatgggcatggccttttggggagcagctgaaggtccacaggtaggaagaaagctggatgcattactgggattggggcagagaagtagtaggggccagagaagacggtctgctagaaagctaatgataactaaccagtaccccggagctcttgactctagctgcatatgtatcaaaagatggcctagtcggccatcactggaaagagaggcccattggacacgcaaactttatatgccccagtacaggggaacgccagggccaaaaagggggaatgggtgggtaggggaatgatggtgggtgggtatgggagacttttggtatagcattggaaatgcaaatgagttaaatacctaataaaaaatggaaaaaaaaaagattgagggattggaattggagcacaggacagatagtgaagatctcctacatgacctacataattccctggcttgaagaatggcctgactgtgatttgcctatgggtttccaggtagagagtgactacaggagctgtgatgaccaaaaaatcggtcagagtaagaaaactgtaggaaaagatctgtgcgcttcactaggaattggtggcagagagaaatgaatatcagggagttgggcacagcaggcagtgagctacaaatctgagataacactggggcattagaatttgaggacattggtatttgagagaatgtagcctacctaataatagtaaagatttcttaatttgggagatatatatgagactctttgtagaaggtataagttattctttttaagagttatttacaaaggctctgtgggaagattggatacctttgagtgcatactgtggagggaaactctggcctccacaaatgtatgtacacatataaacatgtaattgtcaccactagctattggtcttatgctgcccagagtgcactaagtaacatccactgctttttgtgatttatcaactcaacattcctaaccctttcactgtattcatggacaggagcattgtaccctcccaaacccccactctacccactgtgcatctttatctttgccacaatagcatcctacttttgctttagagcatcctttcccagcagctcccttacaaatgccacttatcatttgataactcaagagcctcatctttcatggttgagaactgacagaggagagacctaggaactgaacttgggacatctgtcagagcagtgattgcccttcaccattgtatcaggtccttgcctcctgattttgcaatattttttgttaatttctcttttatttcatctaacaagattaattatacacttcaaatttacaaaaaaacactcaactctcacaaaggactggtgggaaaagcagccataactgagtacatggtctttctctgctttattgtcacctgtgacatcagaagacctatgtagaaaaaaaaaaaaaaaaaaaaaaaccttagaaggtttgtttggagatttccttgggcctcaattgttaatattcaaatagtattgggatgtccaccatcccctttctttccttctgtctttccactatacaagaggaaatagagaaaaaaaagatatttttagattgttgaaaatgaagagaaagattctagtaagtgtaatgaacttcttccagagaacagtatttctccttgtatctaaattaactaatgaataccattatagttagtttaagtggagttcatcttcagcaccgttctataggtttaatatgaaattattaagatgagatctcaagtagagagtggtgactccattggaaataaattgccatgcaagcatcaagaagtgaatttaatcatcagaatctatgtttctaaaaagccaaagaaggggattcaagtttgcaataccagtcctgggaatgtggacacaggcaaatatctggggcttgttggccaactagccttgttaatcagtgaccttcgggttcagtgagaggcagtctcaaaaccaataaggtagaaaaacaactgaggtggactttaaccctttgtcctccacaagcatgtatatacacacacatacacacacacacatacacacacacacacatgcacacacacatgcacacacacatacacacacacacacacacacacacacacagagagagagagagagagagagagagagagagagagagagagagagagagatgcttttgctaacaaacatactaagcaggagtctaaatctaaagagagggctcagtgtaatacgcttgttatgcagatttgaagagctgaattgaatctccagaagccatgggcaaaagctaggcatagtatcatatacttgcaatcccagcactggagagaaaggaacaagaccagctagcctagattacttggaaagctacaaagaaaaaaaatcctatctcaaatataaagtgaccagccactagcaaatgagatcccatgttggtcactgacctccatattgtacacacagacacacagacacacacacatagacacacacacacacacacacacacacagggttcaatatctttgctgctgttctttccacttttctccagtaacaatttcatatgttcagcttgctcatactcaatctctgacaaactctatttgccattatatctatctcacattcctctttgctctctgtctcctgggattatcatataaaactcctccacctgttgtcctcaagttcttcctcacatgagatatctgcccagcggcatccctgggagcataatcagaacatatcttttaaggtgaggaattccacctttaatacagattttttgaaataggaatactaacttttagttcagacttcaccttctagttgaaacctataaaaagaacaaggaagaaggatgcttattctctttgcctgcttgctctcactgtaaagtccattctttgctggcattagatttttttttttttcagaaacctaggttataatgaagaacagctgaaacatccagtctactggattgaaaaactactggattcttggaccttccatgggtagacaaccattgtaggactagctagacaaaagccagttatccattataacaaattatataatacatatatatatatgcatatacacacataatatatatttatattatgcaataaatatttctagtaatatatattatatattatataaattctttaaagaaccctgactaatacaaacaagaatcagatttttttcaattaaattactgcttccaatttttacttatccaagaaaaattattacaatatgccatgtcatagttatgcctatatcacagatagacactacttagttttgtcacaatacataaacacaagtgcaaaggacaaaccactctagagaacttcatgagcaaaatagagaaatattcaaatttgtttataatggacaacctaatattttgaaatttaaaggacactcatcctcaactcatcattgtttcaattacatttacattcacaaaataacaggaaaataaatagcctaatagcctatggttatttttacaattaacatgtcattttggagactatactaaaagaaatgcttgaatatttctggtgtgcagttaaaataccaaactaaaccaaacaaacaacaataaccaccacccatccaaccaaccacacaaacataaacaaacaaaaagcagcctaaaacgtaaaacttcttcatttgtggccaagggtgccttgaaattgcaggaagtagaataaagagcttggggtgggaggggaaatgtgcataggagatagccaggcctggttccactttctgcatttttcaatttgttttcttatcagcatgcccataaactggaaagcattaggctcaaactcactgataagcatatgagaatttcttctagtcgtctccaccttctgtagtggaaattcttttaagagttttggacttcatatttgaaataaaatgagtctggaaacaaattattttaacctcaaagagtcggtgcataggtggtacacattgtaatgatttttaaatgagtgactaataggacacctagctgaagaaaagatgttaattaatttagcttactaccaatctagcatatgacaaagaattcttaccttgagataatgaagcttaaatggttgcttgctacctgctaattcagattctgcaagaaggcaacagaaatggactcagagccattgggaagtgttttgggacttctccatgggtggtatgagaagatgtctgcttaccccatatagagccaagaactgagcaaagtgagaattctaccaaagttcagcttggagaagcaatacatttattgggtctgtttgtagacatttgaatgaaaggtttcgtatagaacatagataaatagatgagagctaaatcacagaaaagctcaccctagggtgagtaatgagtcaggaaagcaacttccctcattttttaaaaaattggatattttctttatttacatttcaaatgttatcccttttccctgggtcccaccctaaaagccccccccccacgacaacacactcactcctgcctcttcaccctcccattaccctagactggggcatcaagccttcacaagaccaagggcttcttcttccattgatgcctgacaagaccatcctctgctacatatgcagctagagccatgggtccttccatgtgtactccttggttggtggttcagtccctaggagttcttgggggtcaggttgattgatattgttgttctttccacggggttgcaaaccccttcagctccttcagtcctttctgtaacttctccattgggcactcgatgctctgtccagtggttggctgcaagtatccgcctctgtatttgtcaaactccagcagggcctctcaggagacagctatatcaggctcctgtcagcatgcacttcttagcatccacaatactgtctgcaattggtgactgtatgtgggatgtctccccaggtggagcatttccttcagtcgctgttcttcactttgtctccatatttgctcccatgagtactttgcttccctttctaagaaggaccaaagaacccacactttggtcttttcttcttgagctgcaagtggtctgtggattgtatcttgggtattccgaacctttgggctaatatccatttatcagtgagtgtataccatgtgtgttcttttgtgattgtgttacctcactcaggatgatattttctagttccttttacttgtctaagaatttcataaactcattgtttttaatagctgaatagtactccattgtgtaaatgttccacattttctggatccattcctctgttgaaggacatctgggttctttccagcttctgaatattataaataaggctgctatgaacatagtggagcatgtgtccctgttatatgttggagcatcttttgggtatatgcccaggagtagtatagctgagtcctcttgcatcacttgaaggcagcctaactggtagaaaagtttgctgtagacatctcaggccaattgaggtctcctttatccagcaaatgtttaatatgatttaatcttcttttgataaataataatttaataaaaacataattaataatggaatgtaggaaggtaagaaaatcaatacactattctgagaagggtaaaagtatgatgagctccatttagaaacatgcaatgcttcaaataataaattctttatttaaaacaaatttttattagctattttcttcatttacacttcaaatactatcctgaaagtccccctataccctcccctgccctgctccccaactgacccacccctgcttcctggctctgacattcgcctgtactggggcatataatctttgcaagatcaagggcctctactcccaatgatggccaactaggccatcttctgctacatatgcagctagagacatgagctctggggttactggttagtttatattattgttcctcttatagggttacagaccccttcagcaccttgggtactttctctagttcctccattgagggccctgtgtttcatccaataaataattatgagtgtccacttctgtatttgccaggcactggcatagcctcacaagagacagctatatcagggtcctgtcagcaaaatcttgctggcctatgcaatagtgtctgcatttggtggctgattatggaatggcttccttagtggggcagtctctggatggtccttcgttctatctttgttctagactttgtctctgtaactccttccatgggtattttgttccccatcctaaggaggaataaagtatccacactttggtattccttcttcgtgagtttcatgtgttttgcaaattgtatcttgggtattctaaatttctgggctaatatccacttaccagtgagtgtatatcatgtgagttcttttgtgattgggttacctcactcaggatgatatcctccagatccatccatttgcctaagaatttcataaattcattgtttttaatagctgagtagtactccattgtgtaactgtaccacattttctgtatccattcctctgttgagggacatctgggccatttcctgcttctggctattatagacaagctgctatgaacatagtggagcatgtgtccttattaccagttggaacatcttctggatatatgcccaggagaggtattgctagatcctcttgtagtactatgtccaatattctgagaaaccactagactgatttccagagtgattgtacaatcttgcaatcccaccagcaatgtaggagtgttcctctttctctacctcctcaccagcatctgctgtcacatgaatttttgttcttagccattctgactgggatagcaaaagctattctcaactataaatgaacctctagaggaatcaccttgcctgacctcatgaagtacttcagagcatttgtggtaaaaactgcatggtactggtacaatgacagacaggtaggtcaatggaatagaattgaatacctacaaatgaacccacacacctatggtcacttgatctttgacaagggagctaaatccatgcagtggaaaaaaaaaagacagcattttcaacaaatggtgctggcacagctggcggttatcatatagaagaatgggaacagatccagtcttatctccttgtaaaaagctcaaatctaagtggaccaagaaactctacataaaaccagagactctgaaatttatagaggagagtgtgggtgaaagcctcaaagatatgggcacaggagaaaaattcgtgaacagaacagcaatggtttgtgctgtaagatcgagaatctacaaatgggacctcataaaattgcaaagtttctgtaaggcaaaagatactgtcaataagacaaaaaggccaccaacagattgggaaaggatctttaccaatcctgaatcagataggggactaatatccaatatatacaaagaactcaagagctggactccagaaaatcaaataatcccattaaaaaatagggcagaggactaaacaaagaattctcacctgaggaataccgaatggctgagaagcacctgaaaaaaatgttcaacatccttaatcatcagggaaatgcaaatcaaaacaatgatttaatcttgataggaggttctgggaatcttgtaagttttagctttctgggaagtaggtgtttctattttctatcttattctccctagacttctttgtcttggtgtgtgtcttttaatttgggacacacaggacaactagaatttttgggctaggaagtgaacagaagacataatggactgcacatttgttaatattgggagcatggtgaagaaaccttgaatagagtaccacctcagagtggaacaggaagcctggactggcaatggcctctgtgactgccatggagggagtccctgagggactgtggatgttttcctgttcttagaagcatctttccatttcctcagtctttagagtctaaggagtgagatttaacagaacaatgctacatctgctctttgggatacgattcttatccacattctaaaggacatgggattcataaaatgcaacattcctctaaaaacaaaaggaaagtcgtgtgatgagcaataaaatttgtgtgtgcatgagtgtgtgtgtacatgtgcatgtatgcacatgcatacagctttctgcatgtgagtattgtatgtgcacattgaagcctagagaagacactgggtgttctataactccttgccttgttctggcagtgaggatgctccagagacctctctcttcctccagcagcaattgcaagcttgtgttgcctcaactcctttttatgtggttcctcaggatttgaaatccagtttttatgcctttgcagcaagtcttgccactgagcactctcttcaggttcctaattactgtattttatgtaattaaaaatcaaacatttgtggaaattttaattcttgacccaactgactcttacaaatatctacattcctgccaggaggactacagtaatctggatccctgacttgagttctagaccactggggagagtattaaaaggactctacaaacaatgaaagtgaaagttagaaacctgaagtctattttggggaggattgtagcatcaagtctctgtgatagagatttcattttggagtctgcggataaagctccacaggagagcacttgccccatatatactaggttttgctcttggccctcaaaactgaaaaaaatagaacaaatccagccagaagcccagaagccttctctctctctctctctctctctctctctctctctctctctctctctctctctctctctctctctgtttcttttcctatagggtactgaactgatattggtttacctatgaaaattttacgtatgctgttgattttttttccagatttcttcaacattttaaatagtagatttaatttcatatttattttctactttaacttctgttgtcagtcatactaggtacttactgcttttatttagccttatctgtgagaaagtctctagattaggtcagttgaggtaggtagacaaatcagaccatcccataggttgaggtagaggatttaatagaaaggacagaatgagctgagtaccagcattcatctttttgctttctaactgtgaatacaataccctcagctaacacacagagatgccatgatgatttcccaacgatgatagactgtacccacagacagtgaaccacaataaatccttcctactttgaattgttttgccagtgattttgtcacagcagtaagaaaagtggctaagatgtatttcactgggaatttctaataaattatctcatcttactaagtacttagtactttagtttatgttaggtgctaaaggaaaggaattaaaccaagctgatagtgtggtgaggaaaaaatagaataaagaaaaaaaaatggatgggaaatctacaaaaatcacccaagatcctcaagtcttgataggttattgacattcagaaacattttataatagtaatgcaagcaaaatgtgtatcctgtggattctatttaatatatttggactcatacatgagttccttactattttatctaatgaagcccattcttttttgaagctagaagagttttctgaactagtgtagagaggatttgtcctctcattgactcctatatctattgtctgatatcctgaaagtatatggatgaaaggtaagactttgagagtagagggtgattaaaatccataattaagcatttattacacaggaagccgtagttcatattttgtaagtcagtgccattctgtaaagattttcagagggtatcccttttaaagaactccataaaagaagaaaaaaaccatatatgctgaaagatgagagcagctgaacagtgaacatttgagaatgtcagagatggatgcccagttgacatgaatgattcgactgggctgttccctatcccagagatagtcctgtgacaaaatgaaagcaggaatttataaccaacagatagatttattgaaagccaaaatgtcagaggtaatcaaactatttaacttgtgctcatagcttgccttaacactgaaaaatggacactgagaatttatcacttactggaaaattaaggaaacagaatttcataaagagaaaagctaatggctacgctgaggctttcagtaaaatactgatacaatttttcatggtcatattttaaatgaatgataacaactaataaattccatgtaacattttgctttgctttaaaatgatttcagtaaatatccagaaaagtatatagagccaagcattttatcatctcatccatgtggtgccaaaaacagaaaagcaacatggctgcaactcttaagggtttctattgtatcttctacaacttgcttccttactcttatggggatcatcaccctgatttggaaatttatagtttcctctcacgagtaatatatatgttttctggatctgtcttgattttgttggtattgaaagggacttgtataacccagattggccttgtactagcatagctaaaaaatgatcttaaactcccttaattccaccctctacttgccatttgtttgaattttaggcatacactactatgcctaattcatgctatgttagggatcaaatccagggatttgtgcatgctaggcagccatattggattacatcctcagatcaagatatgtatttaatacttataaaaaaattagaaaacctatccatctatctgtttacacgtgtcaatccatccatacacatttatgtatgctttgaagtggggttttgtgacactcaattctacagatgttttgatctattaaaagccagtaagatttacccaaaatgcacagttagcagctcaacagagttttatttcctccgttatgtttgacaacagttaatatttactcctttgtctttaataattttaattgtaagactaatgcacttctgttctgtttacttgcagtcttttgtgttagcaaattgactaagttataaaagtcaaaatagacttcaatttcttagtgagattttaatttatggtgttaaagggtaattcctccacacttttttaaaaaatgtaatgttacatgttgctcagcaaggaatttttcctactaatagtcagtgaaatcttatcttgtcaagaaagcatgccttttttatttaaaaaaaaagtggggggaaagtttttggttgttttgttttgttttgttttgttgttttttgtttttgtttcattttcgagacagggtttacctgtgcagttctggctgtcctggaactcattctgtagaccagactagcctcgaactcagaagcccatctgcctctgcctcccaagtgctgggattaaaggtgtgcaccaccacgcatagcaaaagttgggtttttaaccagaacaggagagatggcccctgctgtttaagtaaggatgatttagagtgtgtgcagctcttgtaggaggtctgagtgcagtgtccagcacctgcttcacgtggttcaccatctacaactccaacagaagagaattcaattgttctagctttagacattattgcattcatgtgtggatttgtgtgcatgagcacacacacacacacaacacacacaaactaaaaataatcctaaactacaatgtttttttaaaatcatcatatatataataaaattaaaggtaatatattttattctttttatgatccataagagtaagtatgtatattataattttagtactgtatataagatatatttcccatttaataaaaatattgtatttgttcctattagtaattttaaatgacttcaattctttaaaagttatgtgcatgcgggtatgtctgtttgagtttaagcctaatgtagtctaattactgaaggatgttcacatatctcattttcaaaatagtgtgttgcaagttgttttagttttttcctttcttcttcttcccccttttgttctttggatataatctcatctttttttttttttttttttggactgctcttaagctcttaagctttcattcctcctccattcatcatcctagcactgagattacaaatatgcaattgagattacattacattctagagatttatcccaggactttatgtatgttacacagacatgttatacactgagctagagcccagcctgatattgcacttattttaaaagtaaatgttcaatttgttatactatgtatgcataagggatttgataagttggtgttctactttcattctgatcccgaggtaaatattatgaccaaaaacaatttagggaagaaaagtgcttcctggcatacacttctaagtcatggtccatcattaagggaagtccaggcaggacctcaagtaggaacttacagtaggaactatgtgagaacactccctgttgactctttcatgggctcattcttccccagccatttctaaataattaagccactttacatgatcccttaaaactttaaaaacaatagaaaataaaaggcattgaaattccaccattaggatacaaaatataccaccagtcatttttaagacacatattaggaataattacttaattttcatgattacctgttaggctaaatgtgtgaactgtctttctgctagctgccctccatattcagtgtccacatttaatcaccaaaaattatttttcctaagcatttccacgtacctgttctaaaaaaagagggggctcaaattagaggttcatctctttaataccatggaatcaccccttgccctttagagtacaggcaattctgtatcttcaaagccaccatgaaacaggttatccagcatgcctcttcgctcatggcttagccctgtgcgccataccttttccttgcgcacattagatggcctagtcagccatcactgcaaagataggcctattggacttgcaaactttatatgccccagtacaggggaacgccagggccaaaaagggggagtgggtgggtaggggattggggaggtggggtatgggggacctttgggatagcattgaaaatgtaaacgaggaaaatacctaattaaaaaaaaaagaagtttaccttagcatttagtctaccatgtaagactatatattcttcttcttcttgaggatagggactgctcattaataaatctctacaactcaggaacacatagcagtgctttccaagagcaaattacaaatgagatcttaaaagcttagagaattgtattatcgatagaatattgtcaggcaaagagttcatttaactttacagtagtcacagttctgtggtccagggtgattatgcacctttgctctacccaagggacatggcatagagaaatgtctggatacaatttggttactagctaccattttagttgctatggccaaagacatgatcattaaacagcttaagggaagaagggtttgtttcagcttacagttgaaggggatacagtccattgtggctaggaagacatggcaacaggaatgtgcagcagctggtcacattgcatcttcaggtaggaagcagagagaggtgcatgctactgctcatttagctttcatcatgttacacagtcttagactccagctgacagaatgatgctgtacatagggtctgattgtcacttgagttaacctcatttagaaaagaattcctcaacaacatgcctggaaggttttaatggaattctagagctttccaaattaacaataatcatcatcagttgtaataattaaggaaatagagtgttctatatggcttgtttattgaaatcagaaatgcagttcgatatcctttcctatacaggaccatcttctatacccatcttattaaaagtcaggagaacagagattgaaaatatgccttaaagtaagaaaatggcctaattattattgttttaaaaaaggaatataaagaggtataattcactggttaacagtatgtactgctctgaagagagcctgagcttaattctagcacccacattagacagttttcaaacatcactgattctatctacaggagatctgatgttttcttttggctctcactaacacccataatgatacacacacacacacacacacacacacacacacacacacacacacatgcccacacaaatacacaattttaagaaatatttaatttttataattattaaacatctgctatttattagttcatgtgccaaatttatttctgtatcaccatgagcattaatccctgaaattaacattggcaatctattcacagacatgtgagcatctgtaatctacaaaaatacaaatgtgaatgtattcgctaatcaaaatggaaataccaatcaaaataacaatgaggtctttccttagacctgaatagctactgacaaactgaccaagaaacacaagtgcctgctctgatacaaaactggcaaatttatgcattgctggtatacacaaatctaggggaggtactctgagtaacagaggaaaattcctccaaaatttacaaataaaacctccttgtaatcctagtaattacccttatgtggtctaaaaaaatgagaattcacccccacatcctcataggctctgaggtttgaatatttggtccccagtaggtggatttgttttagaaggactgggaggagtgattgcagatcaggatataaagctttcagctatggctccagaaacaagccatcttgcaagtcactatgcttcttgatatgatggttagttagaggccattttagcctcagacaccccatcttgtatatagttttcatgttgttctaggctcaattctaaggaatagctaaattccaagatatggcttctggcccagatgccggtacaaaatatgaccccagtgcctcaccctatactgtgttgattagtgcccaggtgggacccagtagctgcaaaagaggctatgttaagctggtcacaatccagatcaagttatcagggaagacatctgagttatctgactggtagtaatccacttaaaataccagatgtgaacgacagttgcaactgtacaacatgcatgtagttgtttggttgccttggtcttacccccactggtttgtggtattttgctttaaatggatgttctctcctgcctcccactgacacagtttggatcctaaacccagctacctcacttatatatcagcttttgaataacaaaccttttgttgtctcgaacttggtttcaagttcctagatttttttgaccctaacaatggtcatggactaaatctcttaaactataagctatgcccccaattgaatgcttttcaaataagatttgccttagtcatggtatttcttcataacaatttcttggacttgatttgaaataataaaaaggaggatttccagaagaaatagacaatcctatggttaatccagtcgggaaaacccagtgcccataagcaagtgaaatctccattagtgaataggaggataaagaaagtatcctttaatcccagcacttgggaggcagaggcaggcacatttctgaatttgaggccagcctggtctacagagtgagttcctggacagccagggctacatagagaaaccctgtctcaaaaaaacaaacaaacaacaaaaaaaagatagagaaagagaaaagaaagtattctatataaataaaaccactgtcacggtctttctgtatttccatgttggtgttgtttggacttgcttttcatctttttcccaaagtataaggcacaatggaagacagaccaaaaactttcccagtcacaatgtattttaatgttctctgagaacattaccaatagtcgagacttaatttaataatttgactttttaaaaattatatgtgtttgcatgattttgaatatgactctacatagtatggtatcagagccctggagttgaatgtattgttccactacattccacattgttatcttcttttaaactgcctaaaagttttagataatgctatgaaagaattgttccattggtagaatccatcacactagacactgtgatcattctctaacttcacatcttagttcatttcttagacagtgtggtggatgctctgttgtaatctaggaaataagcaggtgagagtaggaagaagaaaaaacataaggcagcttgtactacataatgtgagcctataagtaaataaagctgttgcttcattacttcctgtatttctatctcactttgggtggcatcaatttctgttcttcatttgatcactaataatctaaggcattcacatgtccagcagaggcatcatttgctcctgattgaagcaagaagaaaagagagtgaaataaaatttattcttgggactagaatatgactcaataggtaagagcacttgctgctccgtctgaggacctcagtttggttcacatcaatcacagtgagcagctcacagccctcaagaggtttaattttctttcctggactctgtaggcaattaccctcatgtttatagacatatgagtacatacataactaaaaagaaaataaagcctttaaaatgtttctttagaactctgtgctagctatttttatgtaaacttgacacaaagtacttggctgtgactgagaggaggaaatctcagttgagaaaatgtctctctgggatcaagatataggcaggtctgcaggggatttcagtaattagttgttgtgtatgggcctgggcctggtgttgttcttttgaaccaatttcttaatgaataaaggagccaatcactgggcgaataggagggacttctatctactactgggctgaggaagagaggaagcaggagagagttaggtctttttcttttttctttttctttttctttctttctttctttctttctttctttctttctttctttctttctttctttctttctttcttttttttaattcaaacaccatatgggtaatatgtagctgctagaatttcctagtatcatggcatacctataaggattcatcactggaggaatcagattttaaaaaggcttacaagattaggttttagttgttgtgcccagagattgaattaccattgtttctcaccttcatttatgttgcgttttttttcatgtggtggctcatctgggttcaagagagaaaggtacaaaggcagtgtgagtttgcctgaagtgtaccacaaacttgggggtattaaaacatggggctgttgtggtagtaactagccagtggggatttagcaagctgggtggagagattttggagttttgagtcagatttccatgagataaaacaggtcagccattgctctccagtgcatggccagccaggctgccagtgaagtggcacaagcatgggaatgtgacagttctatcattgtttttgtttgtttgtttggttggttgtttggttggttggttgttttgttttgttttgttttgttttgtttaatatttctcgcaacagttaatgattggtggggagggctcagacaattatgagtagggacactctcaggctggtggttctgagttgtatctaaagtcattctgagcaggccatgaaaagctagttagtaagcagcactcctccatggcctctgccatcagctcctgcatccaggttccctatgtgtcttaagttcctctactcattgatgctgctgatgaacagttatatggaagtgtaaatgaaatatactctttcttcttcgagttgctcttggttatggcatttcatcacagcaataataacccaaactaaaatagactactgggctatgtaacaaaagtttgtctcaaaaatacaatgatgatgacaaaaatcaactctttctatcaataccatacagtgtctcgtcacttggcagtgagcagtatggaaaaacaaatagtttggaagtccattacatacttcctaacagcaaaattcagatgcttttttggttatactcttgtgctcttcagtggatttcagactttaagttattttgtggatatattaagaaaatggattttgaaaacctagggaattggcatgctctatgtatttgagattgaccttatcaaatagttataactttctgattattgggcttcataggttgctaatagaagaacttgattaatatatcaaaatatggcagtttaatgaatggcatcagggataagtattcatttctaagtatatacattttcagtatgatttgttttaaatttagtttgtggaggcagaagaaggacacatagctaaatggttaaccatgcttgatacttttgcaaagaatgcctacattaggatactcacaaacacgttagctctagatccaggaaatttaaagccctcttctggcccttttccaagtacaggtatttgtttatacttgtaaatactcaacacacatataacacacacacacatacacacataaacacacacacacacacgaaaaataatttaaatttaaaaacaccttggtgcacttggaatgaagtcctaagcatccaatttaatgtcgtcagactcttcagattgtacctggaagtatgtgcagctcgacatttgccaaacaagtatccatgacttctgagtattagtggaaaaaccgtcaatccattaaaattatacttgacagctgaatatagattagattctaaatgtataattcgcaaaggcaaccactaatttatttttgttcaatagaaaatgacgactttggggacactctttggacttgaaactttgaataaaatggtaacagcattttggttccgtgttgctttgttttagtctgcactggagctggcataagttgcatttggattctgttctttaaatataaatgtaactacaggcccatacatttattaagtaatacatcttctgaagtcatggatatttgagtaattatttgaggtggaagctttttaattccttttttgaaatataaatattatttgactttctatggaatgatgtaaacaaacatgtattcaccctgaaagggcactagttacagaacaaagaaatgattccatctgataagcctgactgaactacagattggggtggggctacaaataaaggaattaatgaacaattacagaagcatagatgtaacaattacaactcaaaggtggttgattcaaaaaagaaaaaaaaaaactcactcaacacatatgtgatgattgatggctgttgcactcctggagcttcctggaggacttggaggctgaagagtgtcttttcttcagcacttgtcagggctcgtacaaccttgagtggggccttgtcatgcttgtaagtttcaggagatttctttgccttgtgagttttgtttacttcctgagcctagaaagtttagtttaattcctgagtcttaaggatacaagatctaaatttggagaaaaaattgctatgtggcaataaatattcagaaccatgttgtttatgtaaaatacccaggtttcccaacaatagtttgagttataagatgtgtgtgatttgccatcaactttttcgagttgatgtagaaacttcaggtagaaaagaaagatttcatccaagaaagactgtctacttccctgagaatcaaaagaataagagaatgtaaaaggttaaaagtctgcgcttcagttagtttgaataaaactaattctatttcttggtatctctgtcactatggaagttgtctaggaattcctgtcagaaatctgaaattttacaaaagtctgatatacttgctttcaatactgtttatttttgttagcaacctaaaataccactggaatgcaaacagtgaatttaacttcttaaactttcttgaaccatttatgcctttatgctgtcctcactagtgctatatcactctgttactactgaaggtttaaccagtataatatgggcagatggccagcagttgtgataattcaggttgaaatatacacccttcaaaatgattaggattttgatgtgtgctgacatgtgtaaattctgctttacatgggggattggcatgtgcatttattatcccatttactctttatagtaaatctgcaagagcactgtaaatactagctactttttattcagagatgtgaagttcttgtcatacaggtcttttgcttggttggttaatgttacgtcaagatattttatataatttgtgatattttgaaaaatttgtccctgatttctttctgaatatacttatcatctatatatttaggcgggctactaattttcttgagctaatcttctgtccagctacagtggttatctgacagttaactgacagtggttatcagcagtaggagctcccttgtagaaattctgttttcatttatgtatattatgatatcatctgcaattagttatgtttgacttcttcctttataatttgcatcctcttgatctcacttggttgtctttttgtcctagctagaacttcaagaactatattgaataaatgtggaaagagtggaaggtcttgtcttgttcctgattttagtgtaattgtttgattttttcttcatttactttcacattggttataggcttactgtatattgactttattatgtttaggtatgtctcttgtgtccctgatctctccaagacttttaccatgagggaatattggattcgtcaaaggatcttttcagctcctcctccttcttcttcttcttcttcttcttcttcttcttcttcttcttcttcttcttcttcttcttcttcttcttcttcttcttcttcttcttccttcccctttcccctttcccttctcattccttccccttcttcttccttctcctccttcatgttcttctattacatttttattttattttattttattttattttattttattttattttattttattttattttggttgggagatttttaatgaatgcttgtgatttcttagggcatctattctatttaattttctaatctgatcttgttgtgactctggtaagtggtaattatcaatttttccatttctttttgattttccaatcttgtggagtacagatttttttcaagtatgacctaatgattccttgtacttatttgatatctgttgttatgtcctttttcacttctgattttgtcagtttggatattctctctatgccttttacataatttggataagggtttgcctatcttgtgaattttctcaaagaacaaactctttgcttcattgatctgtttttcttgtaccattctctttgttcttattatattgatttcagccctgagtttaattatttttgaccatcacttcttcttggtggtgtttgattattttgctctagagctttcagtgtttctgtgaaattatgagtgtgatatctcactaatttctttatgaagatatttattgatatgaactttccttttagccctgctttcatgtgtcccaaaagtatgttgtgtcttgatcttcattgaattttaataattctttatttatttcttcttggtccagtggtcattcagtagagaataattcagctttcatgattttgtaggctttctgttgatcctcctgttcttgaaatccagctttaatgtgtggtggtctgataagataccatgggttctttcttttcctttctttgttgttgtttttgttgttgttgttgttgttgttgtgtgtgtgtttgtgttaagactttctttgtgatgaagtatgtggttagtttgggtgaaggtttcataaataactgaaacaagatataatattttggataaggacaaaatgttttgtagatatctcttaggtccatttctgtctagaatttgttagtccattatttctctgtttaattgtcatctggatatcctgtccattggtgggagaagtaggtcaaagtctcgcactactaacatgtaggtttcaatgtgcgatttaagcctgattcttttatacttttggtacttttgaataattttagtttgttaaattttaattgttcttttatagatgttgatgtccttggatttggggtataaatattcagaattaagatattttcttggggattttgcctttgttgtgtatgaagtgtccttccttatctcttttgattttggaagtctattttgtgagataatggaatcactacaacagttttcttatttatttatttatttatttatttacttacttatttaggaaaaccgttttcgattctttactctgagaaaatgtctatccttgatgtcaaggtgtgttttttgtatgcagcagatggacagatcctgtttttacatccattctgtatgtctacgtctttttattaagaaatggaatccattgatattgagagatattagtgaccagtgaatattaattcctgttattttgtggtggtggtggtggtggtaatgtgtgcttttaattttgctgatgtgaaattatttattttctatggtttcattggtgtagttatctttcatggtttagaattttccttctagcacattctgtatggctgaattcatatattaatgctgtttaaacttgagtctagaatttgttagtccattatttctctgcttaattgtcatctggatgtcctgtccattgtcgtgggctatcttgatttctccatctgtggtgattgaaatatttgctagatttaatagtcctggctggcatctttggtctcagagtttaaaaggcatctgcccaggcctttccgacatttagtgtgtccattgagaagttgattttatatgttacttggctttttttccttgaattattttatatactttctttattctgtaagtattatgtggcaaatggactttttttttctggtccaacctacttggtattctctttaagcttcttatatctttatatgcttcttcttctttagacaaggaaattttcttctatgattttgttgaaaacatttcctgagtatttgagctgggaatcttctttttcttcaattcctgccatttttaagtttgttctcctcataatatcccatattacctgaatattttgtgtcaggaacttttatatttaacatttttgacagttgtatcaatttttctatcatatattctacacctgggaaaatttcttccatctcttgtattctcttggtgatccttgcatctgtaattcctgcttgcttacctaggttcttttcatcttcattctcccatggtttgtgtttaatttattgcttttatttctattttcagaccttgaaaagttttagtcatttccttcacctgtttgtgttttcccggatttgtttaagggatttgtttatttcctctttaagggcctaataatatttataagattaaatttattgtgtttcagctaccttgtactatcccatgcttgccatagtaaaatagctggactctgctggtgccacattgccctgggtgttgctgactctgttcttgtgttagcctttagtcatctgggttcaaggttattatacgttttagtgctgatttatgactacctttgttggatgaatttttcttttctcataattttcatcttgctttctgtttcctgtgacctgaatagcctgtgttctggtgacaagcaagtccttgattccatcagtttgtctccattgtggttttactggcctgtgtgtgacttctggggttttgggaactcatgttgcatctctggttctgtggttatgttaactggcatgacctctggtgtgttgtggcctctggggttccactacctaggctacgtatagttcttgggacagatgtagcctccagtggagttggagtcttctgccagggttatggagcataggagagaagcctgctgttgggactcttggaagggatttaagttgtgttagtggtctgtagtctttgtatataactggggatttctagtaccagtgtaatctctggtagagcagaagtcttctggtggaattgtggtctgtgatttaccaagcatatttttatagaagcaaagactttatattgaatcttttcaaatagtcagttcactgttactacagtagtatcagttatcagtctcttgcatttgtaaaatatcatttcatagccaaaataattcaccaatatgagaaacttaattttaagtagatgaaatattgttgatgaatatatggattagaaagtattaatgtcaaataatttccaaagggcagtctaatattaataagataaggaaggatatggccattaatcttccaatgccatgtgaatacatacacaaaatgatatcagtctgaaagcaggcataaaataatgatcccatccagaaatcacttcataatgcaaagatatactaacatatttggatttttctttcctatatttcttaatccagatttatatttttgaaaacaatatctactatcaacctgatatcaagagcagttctttacgactaacatcttcaggaaaggaaggcattatttttaatgggattgctgactggttatatgaaggtgagttggaaaattctaatttctaaagggcaaaatacatatttgtacataaaatcttaaagaaaatcttctcattcctgatgtccatggcttccctgtttcttctccatatttctttgtaagagtggcatgctgtcttattgcatgggctcacatgctgcctggctgtggttcctatcttcatatatacttcatatatattttatggtaagtggttatgtgaaggtaccaatggatggatttatagagtgttcagactttagttctgatgatacttaactaataactaataaaagagatgatttcaatactcaggaattagatgccaaaaactttcttttctttttttttggaaaaacacaatcacatcattgttaaaaattacatgaagtagattagagagatgaaagaacctgaggtagcttcacagcactgatagtagatgataaacaactgtcttaactccatccccaagtgcctcactttcatggatatctaagtgtatatgcacatgcaaactcacatgcacatcattattgccagaatcatcatcatcatcatcaacatatttgtgggttttcttttgttatttttaattttcttttgagacagtgttttactgtgtaatcctatctgtcctggaacttactctattgatcagagtggccttgaactcacgtgcatttacctcctgagagctggaattaaaggtgtttgtcctcacaacttggctctacattatgaaaaatcaaaattaaaaagctgaagagatgattcatcacttaaatgcaataaatactcacaagggatcaatttctagcatacctgttggttgcaattgtctttaaccgaaattctaggatatctaatgctattttctggaatctgtgagttcctgcattcatatgtcacataaactcatgtaagttcacactaaatacataaaaaaataaaattaaataagtacatttaaattacagtaaaactaaatttaaaaaacctacataaaagatatttgactttagttcttctaatcatgaacgtcctcacatgtttgaataattattccatagaaacaacaagtggggtataatttatgatttatttttgatactgtcaaatcaaattttgacaagagttgagagtgtacaagcaaattagggtgtgaaaatctttgtccagttttgaccatggagtaatcattagctagctgtgttataagaatgagtaagtaggcctgtctttaacacctaggcttacttactcttcaacctggcatggaaaactatgtcaatatttaaattgagtcagtatacttgattgcaaattataaagtaggaataattgataaaatcaatttcacctcttaaatttataaatataaatattctactcttaattttatcatttccacttagagaatatggtattattttctgtaatcaaacttatgtaggtaatatctttcatatttaattcattgtgttacctctgtacaaatgcaagagtcttaaataatctagaccaatattgctgctaaatgttgtacatagcaaccataatatgagaataaagggaacacaattttccaaagtgcatattgtgtataaagaaactaaatgttccaattatacatataaaaatagtttatactttcacatttataaaaataaccagtagtaattctatgttatatattaatagttttaattgttttctcagtaatttgaatttgaagaaatggtgaattctctttaagaataaaagtaagcttaaagaaaaatctcaactaacatcaatattcagttactagtttttaaatgataatatttttgtgtgtgtgtgtttgtgtgtgtatacatgctatactatgtatgtagaagtcagatgacacttgctagacgcagttttgtcctacgatatggagttcatgaatggaactcaggtgattaggcttggtggcaggcacttttacccactgagctatctcaccagtccagacaccactgtttaagatcccttctcaatactcatctgaataaaaaacattctagagaaagataagtgtataagaaagagccttgataaagcaggtgcttctatgcatcataaagctcttacagaatactttgtattcccagcagtgtgatatcattacttctcacagaaaaaaaacattaatcagacatcacccattcatgcatctcctcactcaatggtcattaccgttagccatctgcattccagctatattccagtagtccagtacaaccatcatgagcaattgactatgcagccttgaggatcttatattcaatgaaagatgttaatagtttgagttgttttactaatatgtagactttcaagtttatatgtgtggaggtttgatagttgagtgtacatacacatacacacatataaataaatatccacacatgcacacactacatgcatatatacatgtccatacacatgaacacatacacaccttatacacacacacacacacacacacacacacacacacatacacatacatatacatatacatatacacacacatatatatcttgattagtgaaagtttttgaatggtagtatctgcaatagatacagcatgaaagtgtagaatcaaacatcagagaaatacagtacaagaagagttctctgatgagagtgtaagaagttgcccccaagtttcctagctaaattactagagatgctgaggatagcctgactgataaatcaggtttgtaaaaagcctgactacttcatgtattctagaaagcaatgacataattttgcttagagaagcagagaggctctgttaagcatcctgtgtccaaaacatcctcaatatgataggagactaaatgatgatggaaacatgtccagaccatgaatcatagtgggtgtagatttgtaaagaagttgtgtgtcttaccccactcctgggatttgcaaaatattttccaataaataaggtgcctaagtagatattgaaagattaagaagtattgggctcagagatggctcagctaatcagacgaatggggaactggtttagaatcctcccatccatgtatgattccacacatctgtaattttagtactcctaacagaaaaggtaagcagaggcaaatgaatccctggaatttgatgagccagttcgtctgcagtacacaggtatggacaaataaaacctttcacattcaaggtagaagatgatgtcagacaactgaattccaagatgtggcccttacaggtggcatgcatgcacacatgttcatgtatacatacacacacacacacacacacacacacacacacacacacatacacacacacatacacacacacacacacacacacacacacacacacacaattgcacatgagaagaaaagtgtaatccccaaagccatctttacaaagatacagaagtgttgaacagtcgtttatacctggggaattcaaattgacttgacagaaatggtgtataaaaatgaggcaggaataaggcagcaagaaccaagattggtagtgacctaaaacagtgaactaggactttggttattttgttactcggaaattcagaaaagctgatgaaataggaagtgataaaggattaaatcttctacagagattggtcatttgggtgatggtgtcaagtgtggatcagatcgtgaacggagcttgcaaacagctatttgacatgtgtgttcaatcaagagataatgagtcataaaagttgagctaaaccagttagtgtgaggagagattcaaaagttgacgaggcaatagcaaagttaggtctttgtgactaagcagatggggtacatgagaaaaggcaaagaaagatgctactgctttgggtttgggtcactagtgaatagtgatggctatcagtgagtaggaacgaagagcaacagtctcatgtaattgaaggtttggtataagtgtagacatttcacagcctgttggtgtgctatgatgggtgacacattgcactatttttaagccaatgaggtaaatactcaatgttgcttgtgtagatttctctgccttgaagagagattgagaggactgagctagcagcttcgttttggaaaaggtgaatagaaattgtagccattccattttgttaaaaaaatatttaaaagtattattttgtggggatttatttatttactcatttagtggtgtgtgtgtgtgtgtgtgtgtgtgtgtgtgcgcgcacgtgttcgcgagcatgtgtgtaagagtcaaattggtatgagttgtttctctcagggttccatgtaggcttttaagactaaacacaagttatcagtcttggtaagtatgtttatttgcagagaaactcaccagccccaaatattttttcttagtgtgatgtcacaactcagtgactggggatgagactctcatgatacagtacttacgatgaatcaccagcaccacctatagagggaataatggtatttgtctataatcccagcatcctagagatagagaaagaaagatcagaagttcaagaccatcctcagctacaaagtgagttcaagaccactttggaataaacaaaatctctaaaactcctaataaacccaaatattatatgtaattaatatgttaaatacagataaataggtataaaaatacatgtaaatatcagcaaataaactacaaacaaaacaataaattaaaaagcaatgttgacataaaaagatgatattgaatataaataataatatagacaaaacagtataaataaatcaacataatataaatgtattatcaacaatatgcataataaacatgtgaataaaataaatttaaattgaacatggacagtgtagtggactctgaggaggtcacaattaaacctgtcacatccttctgtcagatgctacttgagatgatggctttgccattcagattaaactttgtccctctggctcctgtatgattatatttcattagggttttctttacccaaaggctcatgaattactcagttctctctccaggaatcctatcatagtcatttcaaaggactggcagtatcgattcagcaattgtttatttcctccaaccagtcactctgtttccccaatgtaccctcagttcctacactccaaaattctttacatcagtataccaacagtgagtcagtgacacacctctgcacagtgtgtgtgtgtgtgtgtgtgtgtgtgtgtgtgtgtatgcatgaatgtgtgtgaacgctgatgatatgtgccctttagaagtagagatttacttttttgtacttcacagaaagcaattcttatctaaatcaccatatttgggagaagcagaacgacacatatcacatgttcacttttcttgagtgaaacttgacttggctaaagaatgttgaggatggaaatacagataaatcacattaaaaaatgttttaagccagatggcactcctgtaggtggaagtctgaggcaggagaattgaaaataaacaaaggtctgctcttgagtgagttccagcccacctgagctacttagtaacagcttgtctcaaaagaacaaaaatgtgttcttaggttgcaatgtaaggatgggacatagtcttttaccttctagcccaatttgtgagcacagtattactgtcacctactggaactaagtgaaataagtccttatacatctttcaaagagccattttaagtctcttagcttctggtaaaattcaaagaaatatgcaaaacattaaaactctaagacaattttaaatattgtatttgttggaaatacatctaatgttgctcgtatacatctctggatttagcgtggggatataactaaagctactatgtcatagtttattttaaagaacttttaagttgaaaaaaaataagattgcacacagttgacaagttcacagcttgaaattggtaggggattaagagagaataatgatataatataatcaaaccatataactatacaaaaagaaaaccctaattaagtattttgtttattagagcaaaatttatggtattttaaaatattttgagaatagtgtggatctgaagacatggcacagtgattaggagtgctagctgttcttgagtttggttcccagcacttacagcaggtaactcccaaatgcctgtaattccagatctaaaggacctgatgtcttctttcaacctatgtgggcacctccactcatgttactcacaaactttaaaataacaaagtatgtgcatagaataagaaaaataatgatgcctaaattatttattgcatgttttaagggatcattctttgaaattcaatccacagctatagaatgcatttattctgtcaagtgtgaatacagtagtacatcaatgaataatggtgcctgtgtttgaaattagtaaatatttaagtgaactgaacaactatgaacaattattacttaactgacctttctactcatgatagtgagaagtatgagcaaaagttagggcagcatattaaataggtttataaacagtgcacagtttggtggcaagtaagagtataaggcattccacagatgaaacattggttcttgctttaatctgaaagaactggaaaaagaaagaaatatgtatattaaaaatattaccgtctccacacactgttgtatctgtttcattaaataagaacagtacaaatctctgtgtttttatgtgtgtttgctacatttttatgttttttttttttttttttttttttggtaatgtgttactcatcaatttatcaaggactgagcattcgctcagtgccagtgaatctagaaatagaaaagaagacaaagttgacatccagaaacagagacatggaagacccagacagagagagatggtgttccaaacagtgtgggttctttatgggtttcaaaacagctgcaggattcacttatatggcagtggaggattaagccaaagtaggacagcaaaagctgagaatgaaagaaggaaatgggaagggcataagacagataattccctcatgaacatttacaagtaggacagaccaacagcagagattttagtggtgtctttaggaattttttttctgatcagactgatcacaagtgtgcaataaacaggtggcatttcagaagaagttgttaatctaaatacaataattgtattttagattttgggaaacactttatgtttttggctgtgtgtcttttggtgtctgtgacaaaaactacacctggtagaatccccagctcctctagagtacaattccttaagtcagagaaataaaatttttagaaaagagcccaaattacactaaattagaatgcagtgtgttttgtttaaaaaaatgtaaaaaatataattagcatagggagacacaatccttatataggtgcaattaaataaatggtagcttttccagaattactattgagaaaattacattaaagatgcttgtatttatctttttcttattgcagatgttggttcttcctttccacacaccttcattgagacagggtcttttgctattaactagctctgcatataccaggaacagcaatctacaagagtccagggataatctcctcttctctcttcatctctctataagagatctgaaacttaccagtgtcaggattaaaatgtctggatttttcttgacccctggggaagtaaactcaagtcctgaaagttagatcagaagcattgtattaactgaagtgacaagttattttgttttgtctttatttttgttctttctttcttcatttacttatttaccatcactatgggacaaagacatattttctaagcacctgtttttttttttttttcatagtaacaatatacttgattttgggaagatacattatatcattgattcatgaaaagtgactatagtttttgttaggtttctgattttcttctctcttttttttttccattacaatgagctcaaagtgattaaggaagaaatttcaatgtctaattaagaggaatggacttgttaatatgttccagttggagccattgttcctgtgggcagtaaaacttcataattaggagaacagaaaatgtgctatcccacgtggttccccagtgataggccttaccttgtacactccttgtttatcatgtttgcaatgctgttaaataataataaaaaaactccaatatttatacagaacaaatgatcccatgtagcatttcagaaatttaaaagaaatatgaatagttgataggaccagcagtttcctacagttagggaccatgtggcccttttcttgccattaatatttgcttgtttagagccattgaaacatagatagtatgacaatttcagacagtttggtaagatttcttatagctgctttcacaagcaaatgtacagcaaatactgtacacttccagaacatgtgcttgtctgtcacacagatgccatttcattgactctaagtgtcctaagcagtcagtctgctaccagatatctggtattcttgaatgtaaagtgggagttgaagactaactaatgcactagaggttataatgtctgtatgattattgattatgtatgtggtctgttgctgttactttagcatcctcataaatatttttacatatgtttagtccttctgataaggcttcccttaatttctctgactctaaattttaagttttatgcttctcatatgtctgatcaagtggacatttcttagttactctctacaggtcaaagcttgttactgaaacatggaaatattttgttcaaatttctttcatgttgtagtacctgtttaatattaaatttcagtgacttttctgagtcagaatatagtatagcaatgatctagttccagcttactcgtgtgtaccatgctcagggacttgcctacaatttaaacctgtatctattcctaatctatgtttggaaacagaacttggaccacagacttgaaatgaagtgagacaagtccccaactgatagtttagctggtcacctctgctcttccagcttagttcctcacatgtacaggaatatatattccattttattctgtactgttgctgtgtatattcagtggaacagatagtaatcaagttataagggggaagtttggtttacattttcatttgattattcattgtcaaggtaattggttaatattcaaagattacagggctttccttggaccttgcccctcttttgccaacagcacaaggaaaatacttttccaatgatgccctggaacccaatgttctgcatgtatagtcatatcccaagcttcttggttattcctatgagatttctctaggcctttagacctagagacctatgtcaacctagacctatgtcaaccattttttataatttttatgattactattatttttgtcacaaaaaggtgacacaaatatttgttcttccaaaaacttccacttccatattcatatcacttcaggacaccacaaatggcagttgacccacaactccatctcttcctatagatcaccatactttatttccttcctggaaaaaaattacaatacaacacacacatacacacacacacacacacactatactacactcaaaacaccacctgttctccaaaatctagttctgaatgtgtattttctgaatctcttttctagcattaattacaattccatcatccctaaaggaaggacttgatgtatttggtaaaattagctgaacattcttcatctatgaagaaagcatttatagtggtaaagacatgggatacctcagaggaatctgctataatataaactaaaagcagccactatgagcacagtaatgagctgttcccagacacagagtcatgtagtatagacacatggggcagtagtggtaacagcatttaacgttcacaccaaggcaaagttgatactgcaggatgaacctgtgggaaaaaactggttttactcacttcattctgattatcactgtaactgctgtaatgaccttacactctaggagccagaaggcaaagcatggatacttttgatgtagtttctacaaattaaatttctgatgaacattgttgatcttctgctataagtatttttgtgtgtatagacttttatatatttttattagatattttctttatttacatttcaaatcctatcccctttcctagtcttccctcagaaaatcccctattcctccccccgaccccactccctgctcaacaacccacccatttctgctttctggccatgtcattcccctatactagggcatataaccttcccaggaccaagggcctctcctcctattgatgaccaactagaccaccctcttctacatatgcagctagagctatcttcccaccatgtgtttctttagttgtggtttagtcccatgaagctctggagatactggttagttcatattgttgttcctcctatgggactgcaaatcccttcaactcctctgttactttctctagctccttcattgggtaccttgttctccaaccaattgatggctgggagcttccacttctgtatttgtcaggcactgtcagagactctcaggagacagctatatcaggctcctgtcagcaagctcatattggcatctgcattagtgtccggttttgatggttctttatgggatggatccccaggtagggcagtctttgtatggtggttccttcagtctctggttcacactttgtctctgtaactccttccatgggtattttgttcccccttctaagaaggtccaaagtatccacactatgggttgtactatatgatcaagaattaacaaatgggacctcataaaattgcaaagcttctgtaaggcaaaggacactgtcaataagacaaaaaggcaaccaacagattgggaaaagatctttaccaatactgaatccaatagaaggctaatatacaacatatacaaagaactcaagaagttagacttccgaaaaccaaataaccctattactaatgggatacagagctaaacaaagaatcgactgaggaataatgaatggctgagaagcatctaaaaaaaaattgtcagcatccttagtaatcagggaaatgcaaatcaaaacactgagattccacatcaaacaagtcagaatagctaagatcaaaatctcaggtgacagcagatactggcaaggatgtggagaaagaggaacactcctccattgctggtaggattgcaagctcgtacaaccactctggaaatcagtttggcagttcctcagaaaattggacagagtactactggatgatccagcaatatcactcatgagcatatatccagatgatgttccaacttttaataaggacacgtgctccactatgtttatagcagccttatttataatagccagaagctggaaagaacccagatgttcctcaactgaagaatggatacagaaaatatggtgtatttacacaatgaggtactatgcagctcttaaaaacaatgaatttatgaaattgttaatcaaatggaaggatctggaggatatcatcctgagtgaggtaacccaatcacaaaagaacagaaatgatatgcactcacttataagtggatgatagtccagaaacttggaatacccaagatacaagtcacaaaacacatgaaacttatgtaatatattaaaaagcttttctatgttttattctcttttcttagaactacaaatagtataacaattatacatagcacccaccttgtctgatgagagaatgcatgcaaacatgtttgaatggcatcatgagtgctcatggttttagctgtatctcgatcattactcattgtcctatttttttctctcaaatgatactttaatatgttcagtccatgctacctcaactacccaaatttgatgttccattctccctctctttctgcttttcctggaattaaaacagcaattaaaaaatacagatttctcagagaagtgaataaaatatagcatgctgtctagataatattcatgcacaatgaggatttcaaggacagatgtttgtgggtcactgagcccacatctctacagttgatgtaaaataacactcatttattctagaagaacttctgcattctcatatcgcccactggtggtcccccgatggagagagacttgccttcctgatgataaatgactcgttggtgcctaacatgatcatacctcggtttactggagcactgtaccccaaagcaaagcagtacccataccccaaggtaagcaatgcgaaagagctatttgttctttctctctgcattagtggcttgatggacaacatgcttgatttttctaagtgcctctgaaagagaagtttcctatctgcaaacaaaaccatcaattctaagcttgtcagctgaaatcaaggtagagtgtcagtagaaaaaggtacaagtgaggctagagctattactcaaacaataaatcacatgctgcttgaaagtaagatgtgaatttggtcttctagaacccatattaaaaagcaaggcttggcagtgctgacttgtaaccctggtactggaaaaatggatatggttggacccctggggattactggccagacagactcaatctcatggtgagctccaggctaatgagaagccctatctcaaaaaaaaaaaaaattgaatgtgactagcaccagagaaattactataagggactttctctggtctccatacaaatgcatacatatgctcattcactggcttacgtctgcgtgcacacacacacacacacacacacacaaacacacacatatgttgtacagaggatgtcaggcatgaggcatattgttacacttccattcttatactcattcttgattttttttcttacctattcagttgaaatggggataaaaagagataaaagaaaggcttgaggtgaggacaaatcctttttcgaagtacatccttggagttatgaatagatattatatgatgaagaaatgctatagctaaataagttaggagttctcagtttcaaagattttttagtttctttcagatgatttattaggacagataatgtactataagttactatgtattttaattctctcataaaaattgactgagcataaagaatctctagtccagaaaagatgaatcataaagggctctggtaaagagtagaataagcataaagaatttactagtatatgtattaatatcagcattattttggcagaacatgatatgaatgtgttttatgaaatgttgttgttgagtcctacccagaagcacataagttagataaaaagattttatagggcacgaagagcatggaaatcttgcctagacagcaaaattatgttcaagtgtggaatgaggcctccagaacatggacataaatacagttgaaggcatttggatttctttgcaggctccccttaatgcttcaagttttacttggtagtagtggtggtgtggtggtagcggttggggggcttggggatgagttgtgtatattgcatgcatgaatgtgtataaagatttgtgtagagctcagaggcaagatgtcccaagttttcttcaattattatgcaccttatttttaaagacagagtctctcgacgaaccttgactttaccaaattagctggactgactcacaatcagactctaggattgtggttcctcagccttttcaaatactgctagacacccatggctatgaccaagctttcttttaatgtaggattcaaactttgatccccatgagtgcacaatagacatttttctgacttaacaactgtcttagtcagggtttctattcctggacaaaacatcatgaccaagaagcaagttggggaggaaagggtttattcagcttacacgtccatactgctgttcatcaccaaggaattcaggactgaatctcaagcaggtcaggaatcaggagctgatgcagaggccatggagggatgttacttactggcttgcttcccctggcttgctcagcctgctctcttatagaaccaagactcccagcgcagtgatggcaccacccacaaggagcctttccccgtgatcactaattgagaaaatgccttacagctggatctcatggaggcatttccccaactgaagctcctttctctgtgataactccagcctgtgtcaagttgacacaaaactagccagtacatcatcttaggcatgtagagagaatatcctgtgtattgtatgcatgaatcatctgtcaattgaaaagaaagcctatgacctatggcttagacatgaaagataagtagaacatcaaatttcatttaaataaatgaattacagtaatgtttatcacttagtctttgagaatgtcatagatctgtcattcattttgatcatatctacccctaatcacatgagtacaagttctaaagaaccctgttccaacaattaccctatacaactttgtgtcctcttcattaaaccccattgggtttaattaatgctgcccatatgttcatgggtgtgaggctatccattggagattgagaaacctgtcataaccataggactgaagaaataaagattctactttcccagtagccatattctgccaattgctcctctaccaagggtgagactggatgtccactgaatccaagctgtagtgttgattgacttggtctgctcttctggagttaaactcttcttttagatcacttgttttcctactctaaggaggctttagtgagaccttttatgcattgatcatgcaaagagaacttctaaatgtcttctttatacagtttaagtcttaattatagagagccaaaaagctgtttttactttttgttatggagagtgtatacaacagcacactttcgaaggtcagaagacaacttataggagatgtctgttatctctgtccaacatgtaggtcctagagatcaaactcagatcatctttagaggtgacaagccatttttcttaccataacatccccctgacctccaagagttgattttgagccactggtttggagaaatgttctttgtttttaacatgtgcaaaaatctttgtgggccttgaacttgttcattataccatccatgtgcaatacaggaaaacaccatcacacatgctagcccagtctactgtgatgagttggcagccacttaccaggcccttttcctaaacaccacactcagacattctagagagaacataggtcaaggtttgaatgtggagagccttggagatattctctggctagagtttattaggcactaaatcagtgatcttcagaaaatagcagccagtccctactaaaaaagactcctattcatattttcatcatatgcaagaaacaaattgtgtgaccttcccacagttataagttcagccaggattttgtggatgaaggtttgagcctgtaaactatataccagcctttttacacattaaataaactgaacattcttttctgtttaattctttccttgcttaatttaacaatggtgaaatcttgtctagtggttacagaaaaggtggagagctagctaggagtgtgaaaggcctgcacagctgttcagtacaaaatggagttaggtcagccctgaggaagagataacacagtgattcctttctcaagagtgggaattgcgcttgaattttatttttaaaataatttgcctacctgtgtattataattaacccctcagctacgcacaatcttggttctcaccatgtaagaaaactaacattcataaattgagaaatatcaatatttgaaaaatttaaatttgtcacctagaactcagatacaaaataattatagatatatagtatcatgtgataaattatggttccattagttattatactgtatatatattaattgaccctctcatagatattagctaaaaaaaaaaaaaacaacaataactttttttgagggaagctagcacttttcctcatttaatcttcattgcattcacgtactttataggaatggataagcagctatcctagagtttaagtgaatttttaaaggcatatctatgaggtaggcagatggctcagcagttaagagtacttgatactcttacagaggatgtaggttctgttccaggcgtccaggttgattaccttacaactgcctgtaaatccagctccagagaatctgaagtcatcttctggacgctgcagatacctacatgcatatgcccatacatatacacaaatctataagcacaattttaaaaatacatcttttggataagtcacagctattttaggagagggaaataacatgcacaatggtcctagagatcaacttttatttttatagaaactcagaaagcttaaagatctgtctttctttcctagatactgttatgtgtccatttgcaccacttacagatagagtctcagctatacacagacaatagagagtatcactatattagcagagcagcacagcataataaacgtacagactgggcactgattgccaatgaacgtattaatactaaaacctggagctaaggagatagttcataatttaccactagtcaatgtattatccagaaaaagaatcctggtgctctcaagcttgtgatcagcactggggagacagagataggaagatccctgacactcactggatagacatcattgcctccttgggaggtccagacaacgaagacttatttacaaggatgtgagctgtgtttctgaggatgacactgaggttgtaccttattgtctacacacatacacatatacttttcaggtcacgtgcatggcatgcccgcaaatccccatacatttttataaagtgaacaggcattttagtagtcaaagctaagagaaaggacccttgtctgggtgtggcttttatttgagataaccacccatccagacaccagtttcaaaaaaaaaaatgttagtgtttgggcccttgtactactcacatggtagctcagtatctcttggagtatgccatttaattctcaaacttattttctatctaccctagttttaaatgatcattagttttcccataacaaatgcaggttcaatttgcttgcatacaataaactttcagagagtgtcactttagaaatcgagataatgctgagttcatattaaattaagctagatttaaaaactggtgcagcaaaactcagcatgatcagatttactgatgaaacactcacaccaaacaaacatatttggatttttatttaattcagcacgatttggtgctcataaaataccctatcattagcaactcagcacaaagaagatgcagagttctctctctgtaacctcaggttaatcttcttaattaaaacattatctcgtttaatgacaatttagttgctagtaaaacaaggttaattattattgaggcttgcatttcagaatcatggaggatgggattctgtggatttgcagtctttgtggcaaatgggaatgtggaaagcaaagagatgagctgtctcatttgcacactctctgaatgattcaaatattaaaaggtgaaaatgaactcactaagtttgcttaattccaaactccatggaaaagtaaaattttaactgagattatgaagtgctgaatagccaaatttgggaggcagcctgatgcttcactgggatgcctttatataaaaatggtttcctccatacactttttaatttgcatgcggatggaagctgattgggatatcagtcactctgcacaggtgcaaatttacagtttcagtggcagatttccttcaagaaatgatgtgtgtgtctttggcaaagtaaaccataagctattggaaagagttcactagaaaatccaatcattttaatgcccttatttgtctaattagtgtattaaatgattaaaatataagaacaaatttctctaacttagtaagattctgtcataaaaacaccaatcattttagttcgttgccatatcctgttttagacagtttattcagccatctctttgttactttatgtagtacattttaactaaagaaaacatttttctcccaatgtctatgttctgacatattctcagatgaatatgtgtctcagctttgaaaagtaggtaaactgtgtattggcattttaattatctactttatggtacagtatagcagagccaaatttaaacttagattctcctgactcacagatttaggacttaggtgatccagatctcaaaacatgttccaatcatgagcattggtcatgtcaatcttgtgctaaaggcgaggtacagcccctctggatctagtctcataaaaactaacttctgatgctagtgaggtatgcttagctaacaatagagtaagtatatttatggatagataatacctatgtgatagatagatagatagatagatagatagatagatagatagatagatggagagatagataatgagaaagttggataatatagcaaatagtagttgacaaaaaattatatattgcattaaaaggatagacagtaagtgagacataggtattagaatagacaggttagaaaaataactggtatatagcttgatagtagatgatagatgatagaaaaatgatgatagtgtgttagatagttttatgtgaacttgacataagttagagtcatctgagaggatggaacctcaattaagaaattgccttcagaaaatcagactgtaggcaagactgtaggatattttcatattttgtgattgatgggggagggcccatccagtgatgggtaatgccattcctgggttgatgatcctagattctacaagaaagcagcctgagaaagacagtgaacaacacacttctctgtgccctctgcaacagtacctgcctcctggctcctgccttgtgtgagtccccatcctcactgcttttgataatgaaatattatattttactattagcaaaataacccatttcctccccaagttgattttggtaatgggtttcatcagagcaatagtaatgctaagacagagatttttatgtgatagctaaagaatagatagataataaatagttgtcagaagataatgaaaagtatgtgatagactgatagattacaaacagattagatagatagatagatagatagatagatagatgatatgtagacagatagatcataaaagatgtattgataagagatgctagagatacagatgatatatatatatgataaatatgttatatggtagataattggcatataaatagtaaatgtgtggtaagaataaaagattaatagatgggtaaaaatgatgaataggtggtaatagataagagatattatatgataaagtacaaataggtatagatatatgatatagacaatagattattatagataatatgtagagaatagatgtgcacacatagaacagagtttgatcaaaattatctctgaacaactgtttcctggtgtagatctaattagacctggagagtctaattctaggtctgtaagatggggatcagggatttttgtttggaaggtaccagatgatacaaattggtgctgctggcaatgaagagtctacatggtcaagttacctcataaaacaagttttaaattttaactcacttgatttacctagagaaataaccaaacaaaaatgtacgtgaattttgttcctcataattgcttttagtagtcaagaaattactttgtttttgttgtggatgcatgagtttgtgtgtatgtggcagtccaaggttaatgtcaggaataatcctaaattactctttcactttattcattgatatagggtctcccaatcaaacccagaactcactgatatggctaatcttattagtcagctttttctgaagatctgttttccaccttttgtggctggaattttgttgcattaatgtgcccagtttttcctctttaacttttactgactattagatggtgactcatatttaaatgaccattgagaggtatagaaacagcccctctgttcagcataaacagtctctgagtctgtgataggaaaagaccaccaccaagctcacctcccatttatttatgtgttggggaacctaactccagttcttatgctagcatggcaagtgatctaaacacttcccaagcccagcatgaggtcattctttcattccaccatgtaaactgtttgagaaatattcaaaggagctgaccttaattcctcttttgctcatggagtattctgcaactatttgtttgtcattgcctgggagttaacataagggataactagtttgtgtaagtctcagctctcatagtattagtgaatttgctttatcgtctctatttgtatctagaaaaatgattataataatctttgtactgaagtagggacatttaatgacaaacctaggtcataatcctttagaacatgttacaaactaggagtgtatgagccaccatacttggtagttgttgttcctttaatggaattttgattaactaaaaacaaattacacattcacttctactcgtcctgccacacactcagagatggctgcttcttcacctctcaagggtcatttaagtatatgagtcacccatttagtaatcagtaaagcttaaagagaaatgatgggacacattattgcaatgaaatccattaggctcttttgaattttaaacatgtggcatctgacacatgtggtaagatttttttcataattctgcacttatttatttattattatgtgtttatttgtgtgttggcacacatgtatagttcagaggacaacatgtagcagtctgttttgggtaagatatctataatccttgtaggtgggacttttcgctgccttcttctttcctgttccctacccttttctttcttgttcccttacttttcttctctttcattttttatgtcttttacttcctccgcatccccatttcccattttcttccacgcacattttttctactggcttcttttttttgttccttatcttccctttccttccctttcttccctgtcaatataaagcttcacaccgaagtctttattctatgatgtgggctgttgcttggtctacttgctgatttgcatgcccagaccttctacagctctgcaaaaagagctcaccagcacctcttcatgagtaaaactacctcatttcccataacctttaattgtctctcttaaatgatccagaagcagcaatctgcaaaaacaattaaaagtaatcaagtggatgaatttaaaaatcatttccatttcaaagaaattaactttttatcccaagtaaagaggaacacacacacacacacagagagagagagagagagagagagacagacagacagacagacagacagacagagacagagaaacagagacagagagaaattaaaccagttgtagtttctgtttttcttttctttattttaacataggctaatgcttatatattacatatcacagcttttattttctcaaaggcaggtcaagcgaacccatcagtgaagttatatgttgtaaacctgtatggaccaactcatactttggagctgatgccacccgacatttttaaatcaaggtaggcaatttcaattcaactttaaaggagaaattaggtatttcccatccaattatcattttgttgccatttagagaatgatgtgatcagtaccacctattctgcttggaaattaagctgaggttgcctccatccattgggaatgaagtcattctgggtgtctggctattcccaagaagtatttagtctcaaggtgattagaggtaccacaaaatgacgaaagctattaatgattgggaaaggacgttgtctgtagatttgaaggagattaagacacaggttaattttacatagaattttctactagattacagttactctattctttttaaatggtgctatttcgaagggggaatccgtgattgggaatgcagctcagttggtggagtgattgccaggcatgagctaagtcctgcattttgtagacccctagcactgtgttaacttgatatggtggttcacatcttcagtacctttgaaaggagagtagggaggatcagaagttcaaggtcatcctcaattttatagggagatctgagccagcctgggctatgaaattctctacattgtatgcagtttactctaccatttgttgttcttctgcaagcagaacagttgaatgaaatacgacttatttcaagatcagaagcctttatattcatgacatttcaacaggtcctagggagatggctcagggtataaatctcataaggacaggtttttgatcctcaaaacatacatagagatagatgttatattgttcatgtgtcagtttacctgtggtaaggttgaagccagcaacaagagaataactggaagctcagggctcaacaaatatggaggcccacagtgtcaaacagcaagagaccctgtttttaaacactgtaaaagtagatgaattatttctggctctcatttctgtccccagttccaacaaatgcactgtagcatacacacatctgaatgaacatatcagaaaaaatatgtgtccaaatcataaatttaatataggaaacacctttatcaccaacctgacataaatgattatttatacactgaacgcctaaatgtctcaaacttctaaggagcttcattcagtgttataatcaagttatcaagtccctagagatgaaacctgtaactaatcttgaagattagctgttcataaatatcatacctacctcatttcctttacactccatcaaacattcccattttgtgtgtaatttatagcacatatatatatatatatatatatatatatatatatgtgtgtgtgtgtgtgtgtgtgtgtgtgtgtgtgtgtgtgtgtagcatagtccacactacatatgtatgtgtatagcacaacccacactattcttggtaagatgggactaatcttattgtttgttttgacgatatgtataataaactcaaagtgtcttactggtaaaaacttatttgaatgttgacatattttgggaaatttaatcacagttgggcacatttattacaatctgatgagtatggaagttgttagtttagaaggcaatagaatttatgcaatgcttctgattaaggaccctctttaattacctaatataaacttatttttgtaatgaataggaaaggcaaaacccagggagaatgaatgcttgtggtagaatcttagcatcacttgttagcacaaatccaatgagattagaccatttcatccaatctcagaatacattatccacattcaaaaggaaaaaaaagaaaaccttaaagtggttcagaattgacaaactgtgcatagtagggttgaatgaaccaaacagaaagttctatttgtgagcttggtttagcagacgtgagtgattaatcacaagtcaagcagcatgttcaagtcctgcacaggacaaagcaacactgatcacagcacagatgggaaaagggcattgtaagtactaagctctagctcaggatcaattgccaggtaatgtctgctgagcgaagagtagacacttttcttacagggtgaggcttctgagacgtttgcaggctgtagtagatggtcctatgtgaatgcagcactaagcagaatcagtgaggtttttgagaggcacagggcatcgtgagggcacaggtgagcaattgtaaatagagaagggatagatttcatcaaaatgattatctacatgtatgcatttttcaaacaataaaggatgaagcaatcataggaactattaatattttattcctttacccttttctttttgagttgttttataataaaaataaacaggtaaagactatagaggggcttgtaacttagttctgttgatagaatgcctggctgtcattaataaggtccttggctcaatgataaacaccacaaaatcggagtgtgatgatacatacctgtacaactagccttggaaggtagagttaggagggcctcagcatttcagggtgacctcacaaatctgaaatcagcctgggatatgtgagaccttgtctcaaaacacagcggaaacaaaatgacaatgaggattaaagaaaaaaaagagaaaaagatgtggatagaggccagtaaacttagaaatgagccattgaggaggggtaaagagactttaaggaaatactgtggaaagtgaaggagaggttcaagttgagaacagtaaggagctggattggggaatataaactgatgctatgtttgcttgaagaatgccataaggaagctttttacagtaccctgacagggaccctgcatgcatcaactcttagcagtatgtttgcctacacaagataatacctgtcagcattgcagcatgaataggggaaacattcataaggccccatctgtagttatattctggggagtctatggctgctgaaggaaagagagttcagtgtgttatgtgttgtattggctggttttgtgtgtcaacttgacacagctggagttatcatggagaaaggagcttcaattgaggaaatgcctccatgagatccagctgtaaggcatattctcaattagtgatcaagggagtaaggccctttgtgtgtgggaccatctcttggatggcagtcttgggttttataagaaagcaagctgagcaatccaggggaagcaagccagtaagttacatctctccatggcctctgcatcagctgctgctgcctaacctgcttgagtttcaatcctcacttcctttggtgatgaacagcagtatggaagtataagctgaataaaccctttcctccccaacttgcttcttggtcatgatgtttgtgcaggaatagaaaccctgactaagacaaattggtaccagcatagtggggtattcctgtgacagcctgacaatgttttgggtaggactgtggaaggactttggaactttgtgccagaagatccattcggtgttaagggctctgtagaatgttatgtaggagcttggaagataatgttgagaacagtgcagaagatagaggcctggcttgtaaaacttcatagggaagattagagactcttttcagggccattgctattttgattgggactattctgtggttctggttagctggggctgaagaatcatctgtggttaacaagataccagaactactaaaggaaaacctttacattactgagactattgatgctggttagctggagctaagaaattagtggtaattaagaagagaccagaatctttgaggtgaaatcttctggggagtgttttctgagaacacagaggctgtgttccagagataaccaaggttataccttgtgatgcagcaggacttggtaatgtgtaagagtgactgacccaggtggtgctggttttgaaggcatgaagtggtcatgaagtctagctgaggcttggcattgtgagaggccatggaaggccattggtgaaggtgcagccacaattgcaattgatggcccaggactgaagaagtcatgaagtattttggagatgtcagtaccatgcgatgaccaccaagaacagcagcagcagtgaagtacaggcagctggagcatagagagcaagctgtgtgatacaaagggtatagctggaggagtgacccaagcgcttggaggagcccagaagatcatgagttggatcccagacattggatggttggaatttaatttttgcttttgattgtgaccgtgcccagatatttttccctcttgaaggaagaaaatattttagtgaagcccacagctaagagtctttgaattttaaaaggtattgaacatattaaagggattgaacttttaatatgtaaagactgtgggacttttaaagttatttatatcttggggatgaataagaaagtaagggttggggcttaatagtgctgtgtttgtttgtcaagttgagaggtgtcaattgtattggctggttttgtttcaacttgaaacaagctggagttataatagagaaaggagcttcagttgggaaagtgcctccatgagatccagctgtaaggcattttctcaattggtgatcaagggtgaagggtcacttgtgggtggaccatcccttggctggaagtcttaggttctataagaaagcaagctgagcaagccaggggaagcagaccagtaagtaacattcctccatggcctctgcatcagctccagcttcctgacctgcttgagttccagtcctgacttcccctggtgatgaacagaagtatggaagtgtaagctgaatacaccctttcctccccaacttgcttcttggtcatgatgtttgtggaggaatagaaaaactgactaagaaatacacacacacacacacacacacacacacacacacacacacacacacacacacacaggaagagatatacagagaagttaagtaaatgtgagggttttagaggagtgtttgcaattaggcacctccatggccagtccttgggacctggaggacaatcaagcacctccatgatcaactcaacagatttggtgacaaggcacatcatccctagatgcccataggcaacatattcccattgtagtctcactatcatgccctcctgcacatgcaccacatccatgataaaaacctgtgcttctctgctctttttcccttcttcccttcctacactgagaggcaacctctgtactctcctgcccatctcttttaataaacttcccacatgataactgtcacatggggtgtgactgtagattttgccacttagatctaataagggacacgtgagagtgagtgcacagaaaatttgggggttagagagggaggggtggacatgatgaaatacattgcactagtatatgtaaatctataaaacaattgaaaaatacattagtttaaacaaacactatttggtaacttggaggaagtcagttattttctataatctctgtcttcattcctctctccatatattatttactaattttcactgattcatacctaaccctgttaagtcatgtcatcaaatatacatagactatgcagacaggatgtcttcagcataaattttgataatacacattgtaccatcatgcatctcatctttatttaaaacacagtctgcaatgattctgggtaaaatgatgctcaacatgacctaacataatgatccagttccttcccagtatccccagaacccaactcagtggaagtaggatggttcagatcatctgaagaagtaggagtattttggaaatgctcacactattagtttaagatattgtaaacaatagatttttttctagaaaataagtagaaagttgaaagtatacactttagtgctagaaaaaggtaattttttttttttaaaaaaaatgatgagttctgaagacactagagaaccatcatattcttttgagaaaatgatctttttaaggttttagtttgtatgcacatatgtgtggaaatatatgtggatgtctgaagacaacttgcttgagtggattcaaaccttccaacaagtggatcctgagaatgaactctagtttcagaacaaggacctctacccgttgagctatctttttggctgagcaacattatctgtttgcctctagtcactctgtcttttatcatgcatttacttattaaagatttagtctcattaccttcatcactgatgtaactctgagacagttcctgtcttctgggattgatgccattgttcttctgtatttttctagtttcttggtatatatcaggtctgaatttctgattcttttgagaaggatctcgacttgaggaaagtcattaattcacctgttttcatgggaacaaatgaaagaacctttcattcaagtggtatataatgtgaacagagggcttaggatgccatccattctgagtatgtcaggaggggcattatagaacacttaggatagaattcctgggtgctctggaatagaatgacttgtatagttgtatagacatgtttgaaaaacacattgatgatacagtcaataacaacaaaggtgtgtgtgaggtctagggaggtggttcaaacaagacagtggtgatagtgcaacaagaaggtcctgagtttagtcctcaggagattatatgtatataaccattaagattatatatatatatatatatatatatatatatatatatatataatatatatatatatataatatatatatatatatatatatatatatatatatataatcttagaactagaaaggcagaaataggcaaatatgaagatcccaggtgcttgttggatagtctcattgagttggtgagccactaggatacttagatactgtggcaaaaaaaaaaaaaaaaaaaggagcaatgagagagttaaagagtgacacacatacacacacatcttcagagagaaacaaaggaagggaggaaggaaagcaggcagaaagactgttaacaaaggtctgattccagcacacccatactgaagtgattctgagagtccattacacatgctttggacacttgaatcttctgagaaacaacagaaagtctctgaaggctagcgtattgtccctttaaccagcttgtttctgcctctatgtctcagcctttgcttatgagctaacagtatgtgtgctaggaattaaagtaagatgtgcatcagggatcttggtgtacagaaagtgtagaacaaagcgagtatcccagcaagcacacctgcctttcctcaatgcctacatggcaacctctaagttccatggtatgtatttgcatcaacttagtgcaccttttccatatttggagaccatcccttttaaaactgcaaatttgtttgcagaaacagctgtcactgttcagattttatataccaagtagaaatgatgcctagatagtaaataaggtgtatactaaggtatatcatattaggatgaatttttgtaaacatgaggtaacatgtataaattaactatatcacctaatcaaagatcaatagaaatgtttgagtacaaaacagttatgcttatcttaaaaaatatatttacatttatatccacttaaaaacaccagttaccaagaatgtgtggttaggatttgaattgttctccaaatatcaaatctttttagaagctaatataggtcaggctatgcagtaaagtgtatcattttctgtgaaggagttgcgaaggtttgtctaagagcatttcagacaaatattgaaatcctgctgttttgctatttactttaaaactcattcttgttatccttgcatctcaatttgccccatgttgttctgttgagacaattgagataaatttttctgtaggctaaaattaatttgccaatgtagccttccccaaaaggctgagggctttgatttttttttttatgatcattgattaacctttccaatgttcatgttaattttaatacaactgggggtaaggctcataaatctttaaagtactagtattaactttataaaactttagagcatttatatctgccatctaggaatatctgaatcaatatatttcaaccttgcttttcctagttgtgtatggtgcatactcttactttatctcaaagccttattgtatatgatccatgaaagactgatgcttacatttctgctttgtgtttctgtgtgcattccaataattttgtgtaggagttatatatgatttggacgtccttactttgtttgagtgataggacaagaattttataagccactcctacctccaagtcaactcgctggctcctttaggattttattggtcacactgttaaatataattacacactcaaaataaatttgttgaaacaaagcactgaaagtagaacaggatctattttattttttctacatacagcctgtcagttagaccagcactattagttgaagatgctttcttctttccattgtatatttttggcttctgtgtcaaatataaagagttcataagtatgtggttttatttctgggtcttcaattctattccattgattaacttgtctgtctctgtactaataccatgcagttgtttttatcactattgttctgtagtatggctaaggcctgggatggtgatccccccaacacacatatagcagtggactgccaggtcttgactcagtgagagaagatgcacctagccctcaagtgacttgaggccccagggagttgggaggtcttctggggtggggtgaggggataggggcctcctcttgaagaagacagggtggggaggagttatgggatgtggaacagtcagagggcagactaggaggtggataaaaaatggactgtaaaaaagattaaagaataagaagaaagaagtggagcagggcactcttccttgtagaacctcctggcagagtgagatggtcaaagaacacatccaaaccagctctgcatgtgattcaaggttgctccagtaactgcttagagaaattggtattacagtttttctgagtttcttggctatttataaatagctgattgtaaaacttcccatatgttttgaataaacttgaaaaatattatgtcagacagcactccattgcaagttgtactcaccctcccgctgacaccttcactttgacagcataacagatgatttgagagggaactgtagctgttcagaaaagcatgcaaaaaaaaaaaaatgtgtgattcacaaggttagatctcttgcccagggttgtcctaggacaaaagatttgcgctataaggttttactatctataaatgatatttttattaactcaaacagtttttttttaagatttaattttatttgtctttacctacataatgagtctatgccaccttggtgcagtgcccatacaggccaaaagagggcattagaccccatagtttcaattaaaggaggctataagcttccccatgagggtgctaggtgctgaaatcctctctttaggatggtacagcaagtgctcttaactgccaagggagctctgcaacctgcaaatatcagctttaatacatcaagcacaaatgcatttttccagtttttttttttaatgctgctcctctgttatgaaatagaggaagtatcttgaaagtttgctgctttgcagtgtatcatatacaacactatgataattgggctttgaggtgtaggagctctgagttttatgatacattatgttaatttcttaacagaaaatcaaaatttattataaataaaatttataatacatatttataacaatctcccatcactttgaggaaataattatactagtagttaacattctttctatgctaaagatttaatgcccagtcagatgcttcagtttgatttctttttgacttttaactgtttgaaacaagaagagtaatggaatgataaaaatattatgactaaatgattggaaccggttcttaatccacagttgacaaaatcaaattccattgtattagttaatttccttgttgttgtgatgacatacctgataaaagcaattaaaggatggaagcatttgtttgggctcacatgtcaaggagatagtcatggggttggagggagagtcatggtagcaggagcatgaggcaggtgatcacatggcagcacagtcaggaagcagagataaataatgctggggctcagctcactttcaccttttattcagtcttcaattcataaaatggaaattctcacaattctctagcatgtctagagatatgtaacctaacttactttaaagtactagccgggcctggtgaagcacgcctttgatcccagcacttgggaggcagagggaggcggatttctgagttcgaggccagcctggtctacagagtgagttgtaggacagccagggatatatagagaaaccctgtctcgggaaaaacaaacaaacaaaaatcaaaaaacaaacaaaaaaccaaaaataaagtactagctagttgtcaaaaagattaatcaagatacataccatgaatacccctataggcaaagactttatacataagacaagacattaaagttgtacataaagaaaaaccattaaaccaaagattaaatttagcaatttttttttagctatgagttgttctttcaacaaaatataacatgattttataattatatacttgtttttcacttttttaaaattaggtatttatttaatttacatttccaatgctatcccaaaagtccacccactcccccacacactcactcccactacttggccctggtgttcccctgtactgaggcagatagtttgcatgaccaatgggcctctctttccactgatggccgactaggccatcttctgataacatatgcagctagagacatgagctctagggggtactgggtagttcatattgttatcccacctatacggttgcagttccctttagctccttggttactttctctagctcctccattggggaccctgtgatccatccaatagctaactgtgagcatccacttctatgtttgctaggcccctgcatagtctcacaagagacagctatatcagggtcctttcagcaaaatcttgctagtgtatgcaattgtgtcagcatttggaggctgattatgggatggatccctggatatggcagactctagatggtctgtccttttgtctcagctccaaactttttctctgtaactccttccatgggtgttttgttcccaattctaagaaggagcaaagtgtccacactttgatcttcgttcttcttgagtttcatgcgtttagcaaattgtatcttatatcttgggtattctaagtttctaatatccacttatcagtgagtacatactgtgtgagttcttttgtgattgggttacctcactcaggatgatgccctccaggtccatccatttgcctaggaatttcataaattcattctttttaatagctgagtattactccattgtgtaaatgtaccacattttctgtatccattcctctgttgaggggcatctgggttctttccagcttctggctattataaataaggctgctatgaacatagtggaacatgtgtttttcactttctagtcccagtcaataaacatgtttttggaaaagtcaagtgtaggctagtttctattttttttttaattgcttttctggtaaataattcattctcacatttttcatctatcatatgtatgtatgtatgtatgtatgtatgtatgtataaatatatatgcctttataatttattttaaattgtatatgtgaatatttaaacaagaatatacacatatgtacacagaatacaatatccttataacatttgagttattgcatctaaaacaacacatgattcttactagtattatgattgtcatgttctaaatgtaagtgttatttttttgtttccaaactagagaatattacatcaccatggttaaatgggtgagcaacacgaggacagtggtcaggtggttgaatcggcctcagaacatctccatcctcacactctgtgaatctaccaccggggcatgcagcagggtgagtttaattaatttccatcttttttgtaaggtaaaatggttaggagtcattgctttggaagtcaggtttctcagggtttcatacaaaaacaatagtaggaaaagaaataaatagttaatgtgtacactttctgactgaggaagggtctcagagtatgagccattttccacacacaccgcctcaagtacctgagcatctaaataaattccaggaaagtgtggttggcaccttgaaacctagcatttgggaggtggacaaaggtcaggagaaaagcagattggctagctataattgttgaattgctgggctccaggttctgcaagagaccctgcctcaatatataacattagaacaagtaagatatgtaatatcaacttttggcttccatatgcatgtgtaaatataaatatgtgaacgtgcacacatacatgccacacacataaacacataaagtattaaacgaaagtgcacactttgctctatacccttaaatatttcaagttttgaaggcagtggtgtcaagaataattacaggagaacagagtcatctcttaaagaaatgaatagatacatttccactgcacataggttgtttaaaacttacataactcatttcagttgagaatttctgtccatattttgtctttgagttgatgttattggaagtatcctttccattttcttaaagattgccacttccaagtatagttcatactagctctgtagacaaaaatgactcttcttctagttattgcaacaatgaattgaatttacatttctaaaattactttctataaactgtgcaataacttaaattatatcacatcttcttgacaaagaagatggatcaataatggattctccaattatgtaataaggaaaacatttcagtttatcctttcctctgtaaaccactaaaaattatataaaacaactgttttcaggtataggataatagaagaacttccacactaggcaagttctctagtgacaagctgcatcttcttcattgtattggtagagaatatggggcagatcctcatctacaggatcagtgagaatcagttatgtctagcaagcccaagctcacaatttgggatgtgtagaaaagaacacccctgatctatgagaaaatattatagtctttggctcagtgtttagatattgctttacctatcagaagaaagtttacctttttaaagtaaaattaaatttcaatagagaattttcaacaatgcataatttataaaaagcaaaatattctatatgtttggagaattataagccagttttctccctcagaaaaagtctttaggaatatacccaagcagaacaatgttggggtcagcaggatttatgcaaactattagagagatatttaataattaactcctttgagaaacatgcagatgaaaatctttggtagtgaaatacaaagaaaaactcaaaaatgaaattttataataaaaatatacaattttcaagtgaaaattaactgactgtgtctaagcatattaaacactgttgaaaaacacaaaaatacaaacaaatgtgaatttctgaaatcaaaaatataatttcaatgtttaatcattcactgtgggcaaatcacagaagcaagagtttgaaacagctggtcagtcacagcacatccaaagtccagagcacagcgaatggatactgttatacttactagcttctctccttaattaagttacatcaaactttgattatatgtataacaatgcaaattgatatacctattaaattatatgtagaaaattttatgataaagacaatagagtagtaaatactgaaaacaaaaatgatataatatttctcctttataaatctgtacaatgtgttcaacatattcaagtgtttggtaaattcaaaacaatataatgataaacaataatttaaaagctcataatcaacttattacaaatgaaagacttagtggaaatattgataatatcatcaaagaaaacaacattaatataagaggacataattaagacaataattgtccattgtcagacacagcataaactagaaaagaacagattgagagatctcagactgatatgcagtcattgtcaaaattactcaggtgtgatttttctgaaagtgggtggattgcataaccacataggaaatgtattattttatttgatcaaactagagcaatgtaattaagccagtgattaatagtccttttgttataaactgttgactactcaggaatatctgatcatttaaatatttgtacatctaaaaataatgctttgaaattcataacaagctggaatcacagggaaagaaatatatacaattctaattaatgcctttggttatatctctatctctatctatctatctatctatctatctatctatctatatgctatagtagcctaaataccagtaaagttacaaaatattttatcaagaggacatgaaataatagatagtttgaaaatatgtcattgaacagcaaaatgtataatccttttgtcttcaggattatgaaccttagcctttaatggccaagctatcttccagcccaatgctgaaagattgttcaccagcctcaaatagagcaaagaagagctagagagatggatcagggttttcgggtgcttgctgcttttgcagaggatcccatttctgttgccagcacccacatcaggctgttggtaaccacctataactcaaactccagggaattcagtaatttttctgttctccgcaggaacctacatgaacatggtccacatacagataagcaggcataaacacataaacaaatacatataaaataaatgcaaaaatataaagagtcaaccattttaaaaattaagagttccaaatataaatatgtggtaaatcaccaaatatttggaaattaagaaaaaaaaaacctaaaagtaaagccaagcacattcatgactacaagtgtgttatagaatagggatatgatccagcacttacaaagttgtcaggaatagtagaagcttgagaatgaactcaactcaaagtgagacgctgtctccacagtcaacagaaaagaaaattccaaatgtccttaaatagataagtttaaaaaaaaaaggtagactccagaataatatgtgaattaaagagctaaacaaaaaaaaaaaagctgaaacctatgataaactctactataatgagttgaaaggaagagaaatatattacttaatatatacttatgaactttaatgcccattcagtcctttttcaattctcttgcttccgtcaaatactttgagaaaaacaaacaaaacaaagaatacatcttgagtgagaaagggcccccaaattccagtgtatagctcatccctgtggacatcttggctttagtgaactcatagatgggatgaatctgtgtgtgtgcatttttgactgtatatgggaatgtgtatgtgagtgaaggcccatgaaagacagaaagacagaggcaggtgagtgatatagaagacatggagaaactttcaggcagttgtaagctgccatgtgggtactggtaatcaaagtccacacttcattgaaagctccatgagaacaatttcccaagaataaagagtgaaagatagttctaggtattaattctctgtacataaaaaaaacagggaatctctacaatgacacatgtccatccatatttaaaaatatttttaaatattgaaatttttccaaaatatttaaaagaagagaaaacattaataatgaaacaaacaaaaaacttaagcaaatggtaagtatacctaaagaataaattttctaatactggccttaactgttctataagtttaatttgtttcaagaagaagaatttgaaaatgaaacaaaatatacttctattgtaattgtactggctagttttgtgtcaacttgacataggctggagttatcacagagaaaggagcttcagttgaggaagtgcctccaagagatccagctgtaaggcattttctcaattagtgatcaagggagaaaggccccttgtgggtggtgccatctctgggctggtagtcttgggttctataagagagcaggctgagcaagccaagggaagcaagccagtaaagcccatccctccatggcctctgcatcagctcctgcttcctgacctgcctgagttccagtcctgacgtcctttggtgatcaacaacaatgtggaaagtgtaagcagaataaacccttttctccccaacttgctttttggtcatgatgtttgtgcagaaatagacaccctgactaagacagtaataatagtaagatgaaggtaaactaagatgtattaaaacatttaaatattaaatatgccatgacaaatttaaacatctcaatatttaatgccacaacattataaaagacattttaaaaatgttcagtaactgttcttgaattgaaagacttaataatgttaaatgatcagttctattccaatttcaccatattccatgttaaagttccttcagtccctccttgctagatggttttataaaggattgtatgtgttctttgctgacctcactaaatcatggaggaacttgaacttctagatgttcttgaattgactggctgagtgctgggtgggtggtgtacatcatcatacgtagttttctcagatttgccttcagtaaaataaaagttcatttaaaaatgtaatgagtcctgcaagatgttataaaaggataaggagtctggtgccaaagttaaaatgggagttcgttcccaggatctatgtggttgaaggagaaaaaatcactcaggagttttttcttttgatctccacatacctgttacaaatgggctagcacacacacacacacacacacacacacacacacacacacacacacacatacagagagagagagagagagagagagagagagagagagagagagagagagcccacctcaagaaaaaggtaaaataaatttattgggaaatctatacatgtaaataactcatactattcctacaaataagaaagttagatgcattgtacaaatggactgcaaaatcaactagaatccctgtactcatactaaagagaggtgagcctcagagactggcaagctattggttgaagcacatgatttacagaaaatgggtcatcatttattgtatcagttgatacatactctacaggggaaatgaaacaatttttaaccagatagaaagaaactatttgtcaactatttcataatgatctaatgtaattttgagatgaaccacactcttaaatacgatgtgacataatgtcgaatttcttgaggagattatggactataactgaggttgtgttttcaatataagatcatccccataggctcatatgtctgaactttgttccctgttggcagtagtgtgtgaaagctctagtaggctgaggattgatagcctaatttctgtttaatctctgccccctgtgtgtgaatgaaatgagagtaggctgtgccctgtccctgccccatgccttgcctgctacaatggattatatccctcagactataatccgcaatgaactatttattaagataaatttcctcttgtcaaatatttatttagtcaaggcagcaggaaaaataatacaattctattctactaaataagccaaataatcaccaattgtagaaaaaatatggaaatccattaaaatcagaaattcatcaggaactgttatgaaaatggctaacaaaaaccacagctgataaaactgtgttcgtaaaggcatcacacacaaataaatgcctcaataaatacaatgtaccagtccaaatgtcacaaatgtgtgaaatttgtttgtccttgttatgcattagaaaaacgtagactaaattcttgagatattagtacataggagaatgagtaaattaaaagagaaactcaaaaccaaacagaatttgtgagtgagaggacaaaacattaagatttgtattctttgcagctaaaactgaaaataattcaatgccattaaaatacattttgaagatcaactggaattaaacaaaaatgtaaacatggcatgcataataacatattttatggagtacacctatatgaactgcttggtcattccattaatatttgaacaaaagtaaaatcacatttacaaaatgatttgcagagaaaatacagtattagtgatatttaattcacagtggctaaaagatactggtaggtaacagtcctttaacaggcaatggattaaacactaggtaatattaacatactagagttccacccagccatttacaaaggagtagttatatgggtttggtacatgtgtctttgagtaaagtgtttgctatgcccacataaggacctgaattaagatctctagaatttgtataaggctggattcttctgtgcagtataggtggtggaaggtggagaatacccagaaactcacagttcagacagcctggcatggacagtagcaagcaagagagagtgacttaaataaggtggaaggcaaggactgctacctggattgtcctctgacttccaaacatgagccatggcatagctacaccaaaagcacacacatatgaacacacacacacacacacacacacacacacacacaccactcactaagcagagcctcatataaatacatacatatatgtatatatgcgcgcgcgtgcatgtgtgtgtgtgtgtgtgtgtgtgtgtgtgtgtagctggtacaatcaaaataagaacaacaaaacaacattaacaagagagggatacatctcaaaatgtgttaagaaagaagcctgacaccaatagatgatgcacagtttaattctctggcttcctacaaccagaaaaatcaaactataggaaatagattagaagactgtctttttggagccattgtataagcctgtaacatgggagaatgctaggttccgtattatgatgatacatagataaataaaatcatcagtactgttgaagataagtactcctggtctgtacatttcatttcctgtgaacattctagaaacacacttcctaaatagtttttttgtttgtttttgttttttttttttttttttttacaaaaggagaattaaataagcagtagtttgtcatgtaatagcttgagtgtgaattggatagacaaagctaccatcactggctggaggagagttatgctttttgtattacatttgtagcattactaatatcctcccaaccattatgttccatcggttatagatggccagacttcctggtgtatttgataannnnnnnnnnnnnnnnnnnnnnnnnnnnnnnnnnnnnnnnnnnnnnnnnnnnnnnnnnnnnnnnnnnnnnnnnnnnnnnnnnnnnnnnnnnnnnnnnnnnnnnnnnnnnnnnnnnnnnnnnnnnnnnnnnnnnnnnnnnnnnnnnnnnnnnnnnnnnnnnnnnnnnnnnnnnnnnnnnnnnnnnnnnnnnnnnnnnnnnnnnnnnnnnnnnnnnnnnnnnnnnnnnnnnnnnnnnnnnnnnnnnnnnnnnnnnnnnnnnnnnnnnnnnnnnnnnnnnnnnnnnnnnnnnnnnnnnnnnnnnnnnnnnnnnnnnnnnnnnnnnnnnnnnnnnnnnnnnnnnnnnnnnnnnnnnnnnnnnnnnnnnnnnnnnnnnnnnnnnnnnnnnnnnnnnnnnnnnnnnnnnnnnnnnnnnnnnnnnnnnnnnnnnnttaattctctggcttcctacaaccgaaaaaatcaaactataggaaatagattagaagactgtctttttggagccattgtataagcctgtaacatgggagaatgctaggttccgtattatgatgatacatagataaataaaatcatcagtactgttgaagataagtactcctggtctgtacatttcatttcctgtgaacattctagaaacacacttcctaaatagtttttttgtttgtttttgtttttttgttttttttgtttttttttttgtttttttttttttttgtttttttttttttttttacaaaaggagaattaaataagcagtagtttgtcatgtaatagcttgagtgtgaattggatagacaaagctaccatcactggctggaggagagttatgctttttgtattacatttgtagcattactaatatcctcccaaccattatgttccatcggttatggattggccagacttcctggtgtatttgataaattgttctaaatgggttattactcacctgacaacctagtctttttaaacttgtcctgaatagaagtgctagtgttcttcagtagaatgcttgctttacatatgagaagcaaaactggcccaaccagagaatcatgttacctcctccatgcaagaaaaacctaagaatttttactacatgaccacaaggataagttaacctgctctatgtcctcatgtctgccattaggtttatttaaaatattattgagactgtagtgattttatgctgtgtctgagtttaaaagtttcatttttctgcacatgtaaactgtatgatgaatgacagtatgtaagaatttagctctggagtcttaagaaaaccagggtgacagtaaagagcagttgtccttgttattttatatttgcggtagaaataatgggaattactttagtgaacaaggagaattaaggaataatttctttaaatgctttctaatatttgcacggagccatatataatgaaacattgaaaatacatgctttaaaaaagaaagtgattggagccaggatctggctttggtggttatgagtgcttgatgttctttcagaagaccagtgttcggttcacatcatccatgttaggagactcacaactgtgtaaggccagctctaaagatctgatgctttcttttggactctaaaggcaatgtacccacacggagaaaaaacatatttacatatgaatagtgttttaagagaaatagatcaattataatgcatattacagtgcatatttataatgaacaagtgacataaaatatgaaaatagtatgaacaatttgaaatgagccttccctcatgtagagaagaaccatgcccagtatttttaggtttcttaatttgactcccttttaaaataagtatttgtttgtttcaacaaacttgagctttatgtcatgatgaaacaacattaattttaaaatattttatctacttaacttgagattaattggtcaaatttggcttttgcaatgatcttggctgtgaccatttgcaagatatttcaaaggaaaatcaaatctgacatgtcataggttgtattatttttctctaacactgaatgattaataatgagaaaaaatggttatgactaagagtgaattaattaaaagaatttgagattttgaactttactgttggctgtttgcccagctctgctggagacttaatattgtttctagatgatgtctacaaagcaagaaaacagggtctggtggctcactgaattttgaaggatgcaataaaacacaactggagagtgacctttcaactgtactaccttgataatgccctcttgggatgtaccctcttcaaaatgctgcatctctacttttcaaatcaatattgccaacgagatggatctctgaagggatttctcttgttaagaaagggtaaaatcataaaaagaagagtataagaaagattgcatggatgaatgctcatgttgatctcagatgcttcatgaggcaattgttctgtttcagaaatatgagatgacgtccgacacctggctctctaaacaggtatagtatacgtgtcctgtgtcacttgttggccattataaacatttccatcacacaatagttatgtaattttctctaaaatgttatttccagggcttgggagatggctcatgggttagatcagttactattgcaagcatgagaaccagcatacattcccaaaatccatgtaaatttctggtgagtgctgtggtctgcctgtaaagaaggcagagacaaatttccacagagcaagctggctagttagactaggcagagaggtatgctctgcatttgatagagagacttctttggtggagagattttctttcccgcaactgaaacaacttggcttgttctcatgggcatttacatcatacccaacacccttagagagtccacagttgttgaaattagaaatcatcacaattctactacgtactgtcataagaatcatcttcttcattctattattattactctccaacatagagggtattcacataccctctttttgtacgggtaactaaattttcccccaaatttcttgtccaagaccttcattgttttcaagtttcatcataaatcacctgtcaaagttacctcctctgcaaccctaaccagatatcatctcccaataaaattattgtagagtcacatgtaattttttattgattgatgattgataccttgtacatccttatcacagcttcttctcctcccaaaatgttctcatacagcccctcaccccatatacctcccccttctcctctgaaaaaagggaggctcctctgggtatcactccacccaggcatgtcacatgtaatttttatgtggtaaaatctactatctctctgtcaagataaaacaacagaaaggattttgtctattgctccccattgaaatagatgcctactgcaatatgtcacacaagaatactgccatctacatttcttgaatggggaagagaagatagaaaggctgttgatagattcacaggtagatatatagacagtggtagacatggatggagagaaataatttttcatgttctatatatgtatacactcattaatacaaatttaccctattatgcaagatgaaatagaagtataattttaaatttacaaccaataatatattctcactcaattaagttagatactaaaaagaaaaccaatagaaattaagaatgtgacagatattgatgtcttctgaattgctctccttcacacagagtgttctataaattttcaagccataaaaattcctaacagtttaacaagcatgactatattaaatccaaatttatatttgctgcatagaactcatttttaaacaaaaagacaccatgttatcaattcttcaataagaaaatgcatttggtggtctatcagagttgatttttttttcttttagaaggatcatgaaactcttactgaatgcttaggatttcataaaatagaagaagctgggcacagtaattagtggaagcacatttctaagataattatgacttaagtagcagcatatactcactttcgggatagttgaaatgaaagtaatgaattaacatagttggccttacttccaaaggacctgaagacagtttggcaagtgtgtaacacacatagaagtttgtagagctaatcagctcaggtctaatgtcatttcccacttctcagaaacactgtcataaaggatgttctaggtgtgaaggcagagggtgagagcagatttcatgcagtcatgagttttgagttttcattgtgccttaataattttattcaaatttacttatgttatttctgaggtatcaagatattacatatattatcttatattttcatgaatatccacatgacattgctgttaagaataagttttcctgatccagagcatgtttcagtgaggactataatcttattgccccatgtgacacatgttacagaggaaggcttcatgcttacatgagtcacgcacctgtaaacagatgcacacatactcagtgcatataagtgtacagtggtataagaaacaggtaggaagtaaaagcagacaagactgtggggagcagcagaataccaggctttcctgggataatcatgaagaaggtgaccttagagctgaaacatgcagacataagaggaagatctagatgaagataagaaaactacgaaggccacggtgaggtaggagcaagctctgacccagcgagagtgtaagaagagaggtgaagttcacaatagtgaggtgaggccatttgtaagtccaggagggcatttcaaagttctataacaggggcaggagaactggttcagtggttgaagcaaacactgctcttgtaaaagggcagagtttgattctctgagcccatatgggtaactcccctataactccagctccaggagaatcccatacctctggactccattgaaaatgacacatacacacataaatataaataaaataataataatttaaaacttgtacatcttcaaagaaaaccacaccatgtttagaaaaattctttaattaggcagaaaggaatgtgatgctacatcaaatgttagctctcttaatgtactcatgtgtatggagtactactcagctattaaaaagaatgaatttatgaaattcctaggcaaaaggatggacctggagggcatcatcctgagtgaggtaacccaatcacaaaagaactcacatgatatgtactcactgataagtggatattagcccagaaacttagaatacccaagatacaagataaaatttgcaaaccacatgaaactcaagaagaacgaagatgaaagtgtggacactttgctgcttcttagaattgggaacaaaacacccatggaaggggttacagagacaaagattggagctgaggtgaaaggatggaccatccagagactgccatatccggggatccatcccataatcagcccccaaatgctgacaccattgcatacactagcaacattttgctgaaaggaccctgatatagctgtctcttgtgaggctatgctgggacctagcaaacacagaagtggatgctcacagtcagctcttggatggatcacagggtccccaatggaggagctagagaaagtacccaaggagctaaaggggtctgcaaccctataggtggaataacaatatgaactaaccagtaccccccagagcttgtgtctctagctgcatatgtatcagaagatgacctagtcggccatcagtagaaagagaggcccattggtcttgaaaactttatatgcttcagtacaggggaacgccagggccaaaaagtgggagtggggggaggggggttggggtgggatgatttgtgggacttttggggtagcattggaaatttaaatgaagaaaatacctaattaaaaaatgtactcatgtggatgtgtttgtgtggatgtgtgtgtatatgtatgtctgtgtaaatgtatttatgttctttctgagaagatacacacacacacattctcacacaagtgtaccaaatgtatattcatctaaatatatacacacacatatatgacttaatgttatttaatttttgaaagcttcataattgtattaatgtatgtcattgtggtttaattaaaaacttacctgagattcacagaaagagtgggttgtgtggatgtttaaggaaaaatgaatgacagtaaatttataataaatgatctctgtagtttctacttgtgtggcattttacttcttatattttcagcatagtatcagaaaggaatctcttgatagcaaacttgcttggtaaatgattttataaaaatgtttcttaaagacttttattatttaaaaacatgtttcgatgagctggtctatagaattaatttatcctctttttaggtttgagagataaattactgagtacaaatgcatgccaagctataaagttcttgtctgtaaacatttctcataggccttcactctaatttttgctatgttcatccccaatgcatgatacctcaacatttttccacttttgatattcatacacatactctgacattaaatctatgtattaaaattctaaatgctatgctttgtttctttaattaaaaacaacaatttttctatttcccaaactaattcaaatcaaagaacagcctatgtttgatgttgcttagaaagctgaccccatagacattctgagattcttctgtgcccttctccattctagaacgaggagccagtgttttccagagatggaagcaagttcttcatgactgttcctgttaaacaaggtggaagaggagaattccaccacatagctatgttcctggtccaggtaggttctgggatttttctttggttcagttttattgtcactgaaggctcaatgctctttcctgggacctgtatttgtgtgcatgtacaggcatacatgagcaatgacttggctgtggaggtcagaggacaacctctagggttgcttgttcaattctgcctatgctatgccagctgatccaggtactcccagagattctcctgcctctgtatctcatctcaccagagcagtgctgggattatggatgcatgacaccaattctgccttttgcatgggctctgtacggtcaaactgatgtcctcatgcttatgtgacaagggcttcatcaaccaaacgatctttcccagtcccaaatatcctagttcttgtggctagaagagcctagagtgagtgccatgacgtgaaaggctcacacgtatttttgggagatgatgtcatatattcaaactgcatcattacgatatcaataaaaggttgtcagccatatgttctgtgaattgagggccttggcatgctatacaggtatgtatgtatgtatgtatgtatgtatgtatgtatggatagatggatacaagttcaaggtaggtttgacctcactatagagtagacaatgaccatgaacttttgatactccaactctgtccctagatgccagaataacaggtgtaagctaagattcaagttcatgcagctctgcatatcaaacccaggctttatgtttgctgaagaaatactctagtaactgagcctacatctccagccctgggacacagaaaattgtttttattattttgaggccgtgtctcacgatgcggctctggctgttctggaacttactatataagccaagacttgctcaagctcagaaggttgcacctacctctctctctcttaagtaaaagatgtgttaaagtgttaaagatgtatgtcactacacccaagtgggatgtagaacttaactaaaacacaagcaaatttcaagaacctggtgacaatctaaaagttcactaagtacatatttcctagttttgtatacataaaactatcaagccattatgtaggtttcaaatgtatggactggcaatatggctaaggtggtaaggggattcactgtataaacctggtgacctgagcgaaatccatttaaaggtggaaggaaagaacagatgccacaaaactgttacctgacttccatgtgcaagccatagaatgtccagccacacgtgtacctagtgtatacacaataataaatacgtgaatattaacttttgaatgttcataaccaaggaaatctactttaaaatggaatggcacaatcaattttaaatgcatctattctagaaaatgcagtgcatattttaaagtagaaaataaaaatcaatgtgttctcagtgactatgctgtttcttagagaccttttgaaaagaggaaggaaacatttttccttctaaatctcaaacaaattttaaaagtctaaattattttaaaatcaggttcattaatatctgatttaaatatgtcaagattaatgagtcaatgtaaattaaatttcaatagcgcacattcaggaggaaacaagcatcctgagaagtgaacatcccccctacacagagagagagagctttataatgacaaataattgggaggaaattaggcgattatgagagcttcccaaggttgtagccagaagtatctctttttataaatacaaaatacaatataaatgtggcataaaatccctcacaaataggctaatttaagttcttccctccttcaactcttgtgattattctgaagctgatgcaaccttcatgaaactcacaggaacatccaaaaaaacatacaatggacatggttaggaagaggaatgggtcagcagcagaggaggtaacaaaagagtaatgtggaagtgggtaggacacaaaaacatgatctacatgtgttcaaatgtcctggtgagccctttgtatataattagcatatatgaataaacacattcttttaaatagagtatttattaattaatatatacacacacacacacacacacacacacacatttgtacctataatgttttactttggactgacaaattttatggcagtacgtaaaataaaaagatagccaaggtttacaatattaaggaatttgcacaaatgtgactttaattttaatcaaggttgaaataaaaaaaaattaggacatgtgtaatttctacagcaggataaaagactgattttcatagtaggttattaagttagaaaagtggactagttaattatatacccatgaataatgcagttgcatttatttctaaataaatgtatgtatttatatatgaatacatttctgggtctttctgggtcaaatattgattgattggcataggcaggtagaattttaaggcaatatttttattttttatgtgaaaactggtcattagtaaattaatacatttatttctgctatgtaaaccttatgatcattagtactagggagacattagggagatatatttccaataaattacattttataaatattatagtcaggaaattttactaaacgtttatattttttcatatgtatcttatttatttgtggttgtgtgtatttgtatgtgtgtgtgtgtgtgtgtgtgtgtgtgtgtgtgtgtctgtgtttgtgtctatgtgtctttgtgagtatgcctgtgcccttggaggtctgaagagaatgttagattctttcaagtttgaattacagctggataggagccacccgacatgggtgctcagacttaaacccagtcagtttggaaaagcatcgtgtcctcctaacaactgagctatttctcaagtctttattgattgttaaaacccagcgctctgatatttagctactcctttaaacactcaggatagtaccactgataaactacctgccaggcatgtcaatggacctgagtttgactgtttggtacctgcctaccaggcacatctgtaatgtttggggggatgaaaacaggaggctctccagagcttactggctctccagtctagtcagttcaggagctctgtgttcaggaagagaccctgtctcaaaagccaaggaaaaactgaatcttggatgacacctgtgtcaatctctggcttatacacaaatgaagtcacacatgcacatgcatatgtatactcacaccaaagaaaaacttcacaaagattcaaggctataaacatgtacattatatcatgatattcacattttcaaatgaagacactttatttagcccattaagaaaggaaaccatttctagtattatgttgggcagatggtgtcttccaaggaagggtcttttcatatttagttaataatttctcttttttggaagttttcctgtatttttgagggatatatatatatatatatatatatatacatatatatatgtatgaatatgataatattttccatgttttcccccagtttttctatgtactctttagtatatccctctcccaacttcatttgctatatctattcttgttgtatttgtggttgtggttgtggctgttgttgatgtacaataaccactaagtctagttagtgtttcatatatgaaagtggattggacaacttctggaagataagaaatataccagtggccacattctcaagaaaagtatgtttcttctccagcaactatctactgccagtagctcattagtaagtagtgggccaggagtttttctaaatgcctcaaaaggaattttatctgttgctgaaatagcctgtgtgcaggcacatccattattcttgcaatgtccagagcaactgcacatagtccctgggttgactttattcatctttcatcccaagtgtgaaaatgtttcattgaagtagagtgctttcactccattctggctgccattcggggcattaacaatttgccaaactgagaaaaggacaagactatgctattatttgtgggaatgctgtcaggtgagtgaaatgaacataccagttatggagacataaattgatatttagataaacacagtttgtcatgcacaaatatccacagaacttgctacaaacatgtatagacacacacagatgcatccttacatacatgtacaagaatacatattatttggggatacagtgtgaaacctcatgtttcattttaataagagctataagactgttttattaattgtataaaagtgctgtgatatagtcaatacaacatttgaaaaataatacctgatgaaagtaatgaaagaataaataaatgctttgttgttctgtcattccttttaataagcttttcatcaattgatgcatatattttcagtccctttttacattaaaatatggcctttaaaaagatttcaatcaatataatttaggtttccaacatttatagaatgatatattttttttctgataccctctaatggaatttttaacattttgcatttagcatattctgaattgtgattttcatagatctgtggcattcactcatgcagaattgttatgcttgctttaaatgatccattttcatcattaaagttattctgctctttgatgttagattcttagacaagcaatcttgttcactaacacttctattttaattgccccacaagaatccatttctaaatgttcaaagagttataagtattttagtcagggttcgctatgggaacagagctgatagaataagtacatattaaaagtatatttatgagattggcttacatgatacagtgggaagtccaaaactagtcatctcccactggaaatgtaaggcatccagcatttgctaggttaacaaagctggatgattcaatagctctagtagggccccaaagagctggaaaattactggagagccattttcactatacatgtgatccctaaagaagacggagagccattttaccatacacataattcctaaagaagctaattctagtctcacaatagagatgaagaattaataggatggtgaactcaccagcaagaacaaagctaagcagatgatacatagcagctttccttcttccacagccttttactgggagcatgacagggatgtactgccatgtttagagtagatattcccactttcagtaatcagatcaaaacatctgtcaaagggatgttcaggtgattgcctcgtagtctgttccagatccaatcctgttgacaaattgctccccccaccacaacatttcaccaagtagaccacatacacgtgtaaatatgttcattgggttttacatatagtaccaattgactcttcaaaataaaacatcatcatttatacatgaaagaagagtgcacactacacactacattgctgacctttcaataggatgctgtgggctgtgtatagtccttctgttctgaccttggggctgtagtccattgctaatgagcatgaatggaatgctgatcctgatgggacctagcaacattgtggcctgcagtcagggcacctgtcttgaggctcacctgtgtctgggagcctcctgactcacttagggcagcttcatgtgtttgaagtggttactgactgagaccagtaaatctgtgcaaacattgtgctctctggcataagcatcgatgaaaacatcagaggaaaagctaccccagtgctcccaggctctcttcaggctggagtggaagacttgtgctcatgaacctttagtgtttttttttttttttcacatttatagaatctattcactgtcaaagtgatttaataagtgaaataattattttgcttttcttagcctcgaataaaataggattataatttcatgtaaaatacagtattgaattctgacattcagtctctttctacccactcactttctctgtttgtgtatacatgcatgcatgttgacaggccagctgtcaaccttgagtgctgttcttcaggtggcatctcctccatattttagaaggatttctcatatctcaccaaatagactaggctgtctggcccatgaggctcaggggtctgtttgtccataggatgacaaggacctgctataatggccagttaaagtttttgtattttaattttttatttagatttcaaaaattaatttaaaacgaatttatttttaaattttatttaatattaattttataagttaaatttaaaataatttttttacaatttcatttttttaaatgaggatcaaactcaggtcctcatgctttcccagcatgcactttgtagagtatgttattaccttgtctccttggtgatattaaaaatttgattttcaaaatatgtactttttcatgatgccaaataattattaaaccaattacttttattgccatttagttgatttgatggaggtttagactatgaactatttttcaatgtttcagtgagattatatgcatagtacacattcatttttacatttcattaatttgatatgtgctagtaaaatcacaatctctgtacccaaataaaatatttgtatatccctttacacaattttccaaattactttcactgtgaacatatgaaagcagaaagtctgcatttttttcagtatcatataatctattaaaaattatttgaagaatattatttgtaggttcggagagatgactcagtacttatgagcagttatttctcaatcaccagagtttggacccagaaatgtctgtctgtccagtttttagaggagcagggaaagaaggaatgactttgctggtttccaaacaggccatgatacatgttccaggtacaggaagagactgtgcctcagcggaacaggaacaaaatactgtaaggggacactcagtcaccacttgtgacctctgcccacaggcatcagcatatatgtacatgcactcacatggacagagacatacgaacattaataaatagttgccttcaggaacaatgaatatcttctggtgtgtgtgtgaaaaatttcccctggggaattattttcacataacctctttattactcactcttcttatctctgtgacaaaatactcagcaaatgtaatgtaagaaaagatttgatttttccacagtttgaggacagtccatcattgtgggaaagcatggtagcaggagcttgaaatgcctagtcatgtcatatccacagtcaggaagcagagagagagatgactgccggtgctcagcataggatggaggtgcccacactttaggtgcatcttccttcctcagttatcacaatctagagactgcctcaaagattgcctagataatgtctagtaggtgattctcaatgatgtcattttgagaagcaagattaaccctcacaatatctctcccactcagagaggggtgagcagagtttccagactgttcaggataagcagctgcactgtcattttcccaaactgtgtgaaataataaaaaaaaaaatctcattgttgcatttgccactttgtctgtctatacagtagcaagcactttcactcaggatagctgactattccactcagaacaatattaaattccattattgattagaagtactgtagagaatcacatgcttgcaattcataatcctatcacctaatcaacctaataaaaggttttcattaaatttctctcctctatctgattaggacattgtctgaaaacaatgagttcatttcctgtgatgaatagacagtaaattaaagcatggtatttttaagcagtatagcatctctcttattcactgactgtaaactttgggcagaatttaatatcagatatttgaataaacagggacactgctaaatgtgccaacatgcttccagtttatgaatagaagtgcctggctcagattttgtttctttgcttgagataacatcatcaccaattcagggtgtgtgtctcatgtctagtctccactacagccactctattgtagatttgcagcctgcttcagagggtgaatgaagacttattcctgttccatattttattctgaattcaaagttaaagtaagagttgaattgaaagtatatctccatactctagcttctcttagtactacacctaggcttatatctatacccagggtttctattctgccaagtttatatagaagacatatggattaacaaaaagttatatttctgtgtaataaaaatttgtattcttttttgcattgtttactttgcattcctttcactgagagagagaattccctgataaagtttcttatggccaagcctgatatcctgaattcaagcacttggacctacatggtggaatgagaagcatgactcccacaggttgtcctctgacttttagagacatgccataaagtgtgtgcgcatgcacatgtgtgtgcacaaccacacacacacacacacacacacacacacacacacacacatatgcacacaatgtgaaaaatataagttttcactctgtgactttgtgttttgaaagtgtttgaaacactccctgaaattcagaaatgtctttgtatgacataatcatgcctctgaatttatttttatgtgctcaataataatctaacaaattctgattgttttggaaggtgttgcttagagtccatacaaaagtctagccaacccctggagacttggcaggtgtggctgctgtgtcacatatgtgtcaggaggtggcagagaagagagaggctatgtctatgctaagtgttcttattggtgaacatctgaatgattatagccgaataatttttggaagaaaaaaaaagagttagccagtcaagtagaagtgagcctgagacagataatcatttcatgggatgactctggtgggccaggcagagaatgagccaccagaccaggactgtagggtttgggcagggagctaacctgggatgactaccaatccagtgtcatgcaggctctgggggtgcagaccatgtccaaaatgacctctgctcaggtctataatatacaagtagatcagagaactcctgaaacaacatcagacactcagagaccctgggaaccactaagaggagtaagtagatggtatagaaatggaagggaaacaaaaacagaaagtgagaacaatgaagagagacagaactgcgtaattgagggtagtgatggacagctgatgtaagtaaccagtgatgccaactggggccatggttgggtccaaccctatgctgccatcaggggctacttctgggcccatgtctggatccatgactctgtagcagcaggggtctgttaccacaaaaggccagatagaagtcactggtctgagttgctggctgggaacatgttgatgtccaagggctatacagaacttgtggaagatctggccttgggggccagagaatgagagatatgaccctgtctctaaccaactgaagtagtgtggaaagcagtccatacatgggaagttgaaggtgagacagccccatgggtatgagcatgtgagagctggccctgacacttgtttcctatgtggatgagggcgagataacctcctccctcttccttactcagcatttgcagaaaatggaagacctgatcctgttatcatgagagcaggagaactggccctgtccttcaccacctgcaacactcagaagagagggtcctgtagctcacctaggtagcacaatagagctgaccctaatggcagcaggggtgagctgacctaatggtagagctgcccccaacccccaccacttatttgttatgtggtgatatgatcaaggcaaagaccatccccttacaccttgccacctatagcaggcaagagagttggccccaaggtcaggagagtgggagaaatggccctgtccatcaccacctgcaatactcaggagagcagggcctgttccttgtctagtcagcacaaaatagatctgaccttggcttggagggtgtggtaaggtggacaaggacattgctgttgagctgccttaagagcaggagaacagcagagccagagatcaactcaaatacctctcaggaccagacccagggcttttaattggtctaccacaagatctatcccatcagtgaactgctggagtgcatgaagtggctggtcctacagatctaaaaccacaggatctccaggtcacagggcaataacagaacatctgagatgaatcctggagaggttctagtattgatagagtggaagaagctagaggcctcaaaccagaccaacaagccattgcaatgaacatttgcaagcaagagagtatagccaaatatgtatactgagggacacaatgactcactacaccttccaaaatattttttccttctgttgtgggaaaggctacaaggtgaaggatagttacaatagattttcctcctaatcttaaatgtgtaacgttgttagtcatcttttacctctctgagacagtctcacaatttaacacactcagaaatctgtgatccaaaagtgtttcaaaatatacacaaatataaaaaatcattacaatgttctatgtggtttttcatcttgaatttgacattataaatgagctaagatattgaagtattagttctctgttctgggagcaatcaaagtagattatgaaagcatgtgaagatagctgcctgatgtagtttagggttccatgctggcctttggtgtgtaactgaaaaaaaacaaaaacaaaaaaaaaaaaacaaacaaaaaacacagatttcctttcatccttacatttatacattttgcatacaaagacttgaatcatattattatctcagacagtacacaaaaaacttgatttaacatgaatatggatagctaacagaccagagaatttataaaaacaagattcctctcatttattttcctcctttcattgagacaggtactggggatgtaaaccagccatactatgtaaaccaagtgtccacatgacttgtaaccctcctgcctcagctttctgagcaaagaggttatagatatcaacagagtgggcagggagctgataaatgtagatccataccaagaagactaagaatattttgaagaaaggttctgtttctatagaaacagagtggcatatagactatgtgttcattttgtttcaagtagaattggtaagaaggcattacaagtcccccatatctatacatctatacatctctatacatgtattcagtacgtagttacatcaaaaatgtcttgggactattcccccaagtagcattctctctggacaatgctataaaacttagagtaaactacagcagttacaacttttcaaaagccaaatttctttttctatatataatttcttattttacagatagaatgaaacccagtcaatatctcattacattatttgtctatgttccacatatctaggtatactgtatatatttgtaagctctttaatacatgagtacagatgtattttactccaaaatgtgactttaatcttttaaatttatttatttgtgtgtggatgtagtgtctgcatgtgaggatgtgtagaagtgagaggacaacatgcaggacctggtgtttttatttcatatgggatctgggaatcatgtcagcaagtttgtgtgacaggtgtatttacccactgagatatctgattggccttggcctttactttataagaccttaaagattccatcatggttttgggaaatcttgcacagcccccagatcaacagttctcaacctgtgagtcacaacacttccaggggccgcatatcaaaaatcctgcatagaagatatttgtattatgattcataatggtagccaaattacagttatgaagcagcaatgagataattttatggttgggtataaccacagcatgaagaaccatattaaaaggttgcagcattggagaaccactgcctaaggttacaatcaatcaatgattgctggagaagatggttgagtcttcgccatgaatgagcccttctagattatacagtctcaaatagtcaattaaacatacatgtacatgagccaatattaaatgaactcattgtgtttgaatttatatatacctatatgtgtatacctttctatgtgtgtgtgtgtgtgtgagagagagagagagagagagagagagagagagagagaataattaaagaagtcaagaatttgaaacatcattgtgggtctgtaggagttgactagggagaggaatgggtggaaacaatgtgccaacagtactcatgtatgaagttttaaaaaaaattaatggaattttcattattgtgattcagttctatggaaatccctttctgagaaagatgaatgccagaaattatagggttcaaattccctgctcttttgaccttgctttcaagtaggaggaaaaagaatattttcaaaacattgtcgcttgatgaattaattttctaactaacctcctgaacatttgggtattttttagacaaaaagaaagaatattactgtttgacaaaaaataaaaagtaagacaaaataagtgtcagtgagaaaacttgaaagatgaagagtcagggaagcttaattgctagtaaactcttaattagcataatgcttgaaaagcaaatgcctgccattcatgctgacacatgcttatcttccagcactcatgaggttgacccatacatgcttgcacatgcctccaatccaccaattgggaggctaaggtagaatgatcactagtctcaaaaacaaacgaaagcatgaaaaccatcacaggttaagagtacatatgtgtgttgtgaccaagattgccaatcataggtgttttctccatcatgtacctctggagatataagagagtttgcctttaagaacaaaaatgtgggagtcgcggttgcagtgtgaagattgaacaacttctggaatctgtagcacagtcggatgactgtgcttgaccaacatgttggatatttcaaagctaataagaaaggtatctaatgttcttaccccagtgaaatggtgcacacctacagtgaaggacaggccaagcctgagctggtcaactgtgctgacctgaaataacctgtgagcctgagcaataactcacacatatagagaggaatgataaatgttggaggaagcagtcagctttgtcttggcttcactactatataatataccaaatgttacagcaagaaacaaataaggaaggtaaagaataaatagcattgctcggttgcagcagtttcttctgaaacgtttgctgtgacgctggacaactgcacagctgccacctatttcaatgagaacagcagaagtctctcattggaaacaagtgcttccctcaggagtgttcacagctgcatggccacctggttcttcctgcactgtttacctatggcccaggaataaaggcactgtcccaccatggtctctttattagaatgtgtatgagaccttgaatttagtgtaggaagcctaatgttggctgagaaagaattagatgaaacaaaagctgcctgtacttttttttttttaaccagggagctgctgtttaagtaaaaatgagaaatcaatattttcaattttatttctttgcagagtaaaagcgagcaaattacggtgcggcatctgacatcaggaaactgggaagtgataaggatcttggcctatgatgaaacaactcaaaaaatgtgattgtttttgcttctctacatgggctggccatcagcattgtcaagtgtaatcttttctattattagagaatcatcccatggttgttcaaacaagcaacccatgtaataataaccctctctttaaaagcattgtcttaaagcaggaccaggtactgctcttgtagaggaccaaggctcagtttctagtactcacatcaggagtctaacaactgcttgtaatttcagccctagggaaatctgatgctctttgttggccttcatgggcatgtgcatgcacatgcaactatagacacagatacatatataaatacagatacatcttaaaattgttaaccccacttcattcacatatactgcacacagacctagttctaccacatactcctaagacattagaaaagcttaagaagcaggctggttattttacaaacaagacagatgcattccctgaatacaacaaatgtctatgtctgtaactaagcagccactttctgtctttttgatgagttagaaaattcaagtaagaattaaggttggtggaaataaaatcaaccactaacacttttgctattttctccccaaacagttactttctgagcacagaatcttctccccaagggaggcaactatacaggtaggtggtatgaactcatttcccccaggttgacttttcataggctaagaccagaaagtgacagtggcatgggggaaaaaaaactcagatcattttcttttttttttgttgttttttgttttttgtttttgttttttgtttttgttttgttttgttttttttgtttttttgttttttttatgattccattcatgaaaatagaatttttttaattaggtattttcctcatttacattttcaatgctatcccaaaggtcccccatacccacccccccaatcccctacccacccactccccctttttggccctggcattcccctgtactggggcatataaagtttgcaagtccaaagggcctctctttgcagtgatggccgactaggccatcttttgatacatatgcagctaaagacaagagctcctgggtactggttagttcatattgttgttccacctatagggttgcagatccctttagctccttgggtactttctctagctcctccattaggggccgtgtgacccatccaatagctgactgtgatcatccacttctgtgtttgctaggccccggcatagtctcacaagagagagctataactgggtcctttcagcaaaatcttgctagtgtatgcaattgtgtcagcatttggaagctgattatgggatggatccctgcatatggcagtcactagatggtccatcctgtcgtcacagctccaaattttgtctctgtaactccttttatgggtgttttgttcccatttctaagaaagggtaaagtgtccacactttggtcttcgttcttcttgaatttcatgcgtttggcaagttgtatcttatatcttgggtatcctaagtttctgggctattatccacttatcaatgagtacatattgtgcgagttcctttgtgattgggttacttcactcaggatgataccctccaggtccatccatttgcctaggaatttcataaattcattttttaatagctcagtagtattccattcaatatggcaaggcaaaaaccagtctcagtatgacaacctcagactcttggtgtcttctcttgggtgtggacctcaggaaatttaggaagctacaaatggaacggaattttctttcatggagtttacttctctctctctctctctctctctctctctctctcctttttatttgtggataataaaaatgatgcaactcttatttcagaagtaagaaaaacaatttattccagagccaaatatgagtggccaaatcaaagaaacacagatttaggttacctcagatacagaattccaatgggataacggtttcaagtaatagtaataggacaaagagagtcataaatcgagatacttttcaagagcatccatgggaacctcaggtagataactataattctggggaaactgaggtgccagtatctaatgatattcgtaatttagatgttggtgaaatttagaagtctattcatacattccaagaggatttacaaagtagtcatacaaggttagttcatacacaaaggtgccaacaaatggttcttggactggctgatcctgtaacatcataacttctctgcaatcactgaacttttaatcagtctttgaagtatacagatgttcaatgcagtttctttcttggaaatttagttcacactgcaaacacaacaataaagatatgacaaacctgaatctagttttcttttttccctcattactttatttattcactttacatcctaatagcagccctccctctcatctcagtccctgcccacacagctccatcctctccctctcctcttttcctctgagaagggagggaggaaagggactgcccctcagtccccccacccagtgtacctactcaccatgacactacaagtcattgagcgactaggcaatgccctcccactgaagtgagacagagcagccaggctagggagggagacccagagacaagcaatagatttgggacagcccccactccagttgttcttagaccacatgaagaccaaaatcacatctgctacatatttgagggagtgcctatattcaacacacgcattcttgtttggtggttcagtctctgggggacaccaagagtctaagttagttggcccttgtcttcttgttgagtccctatccgctctgggtccctcgattcttcccaagactcctggagctccatctaatgttttcttttctgtgggtctctgcatctggttagtcagctcagaggagagttattttaggctcctgtctgcacacataacagagccattaattttcatatggccaacctcttcaaaaataaccttgcactctttctctggtcagtcgtctgtgaccctctgggagcctggtagcctatttccagacacaagatttctgtgtctcttcttcattttatttatctacttttatagtttcatagtattttggtacatatgtatgacttacttttcttacctctacatattacagacattttcatagttttatagcaataattctttctgcaccatctcatgttgagttttttgtacatcaatcaatgtgacacaaatataatttattcctatataacataatagcatgatggatgtgtctctgaatacaaattctagcaagcaaagactactttatcttgttctattttcctttctctctctctctctcttttttgtttgttcttgttgtcttgaggttcataaaggtaaatgagattgttggagaaagtagctttttttgagtacagaaggttccttgtttaactaaaatatagcaatacatatgtgaatattaacatctggccaatatgtctaaatgtgaaattaaattcattaagagtttaagaactcaaatattaaaatgtctcctcattctgcaagctctcaacaggacctcacaagaattacttttattttgagcaggcaaaaaggcctattatttctggattctacgtgcactttctaatttccatttcacacactggttttaaaacatgtcaaggctgctgtagtttattctcagtggaatttcaccctgtttgaagaagttttacctctccttaccaagtagtctatactttttgttttgaaagtaaaaatggatatagaggactcgggatataaggtgctcactgaaagcatggagactggagtttgaatttctgacttctataagaaaattcagcattggagaggtgaagacctgggattcccagagcaagctggcttgctatactagagagaataagcaagctctttgttcacagagagactgtcagatgaaatggaaaccaattgagggagacatccacaaatacatacacaggagcacacaccctgaagaatggcatctcttactttcatgatgccattcttcacaccttaacacaattaagaaaaatccatttgatgtaagctctcagataaccaaatctagataactcactattaagactctaagttatatgaaactgacaatgaaaactcacccttacaaccaagaatactgttttagagatgtacatcatattttagtaatttcagtaaaatcaagcaaaaacaaagaacagtttctaaaagaaatgaccattggcaataatcactggtcaaggtcagtagatgaatttacttgaagctctttgctcctattagtctaaatgagacttgaaacacatcaactgttgagaagtatagagttgctcatcttgtgactgtaccatagcctacaatttgcccatgacttggaatagtgcagtgaacttgctataaagagaatacagtgccaacaaatgtcctcttacatggctcatggaatgcccgttagcttgactgtaagatggaacttgacccagaaaactcagtcagagtcttgcttgagctgtaaaaagatcagtcattaattaattgaagaaatagaagttaccaaatccagagttagtatttttgtctaaaagcattgtattatttgttgcagggatgccataatctgggtagtgcaaaagagggtagtagagattattcagtgggtgaaatgcttattatataagcctgatgatctgatttctgatccagagcacccatactaaaagtggctatgcatgcttgtaattattgtcccgaatggctggtgacacaagaagactgctggagctttcttaacagagagtagagctgaaatagcaagctttagttttagtaagagactctgtctcaaaaacataaggagaggggaaatagagggtaacacccaatatcaggatttggctcctgtgcatgcatgcataggagatcactcctaaattcatatgcatatttcatatgaacgcacactaggtaagtaactcataaatatcagtgtgaatctcgtcgaagcttgaatgtgaaaatgttatggaagaggacagaaagacaatgacttcaaatcttagtgttaccaacccagactgaactatatgcaacctagacacttattaactctctctagaatgaggcttggtcatcacttcagatatatctaatacaactgagttttgtgctaaaaatggttgaaataacaaaatctataaccatagttcaaataaatttatgtgattatctcacaagtcatcacagagtgaatttttaggtgtctagtatatctgttggttgtgatgatctcacagcatttcaagtatgaagttgtaactctgagggttgcaaataacactaagcctgatttcattctctcagtcttgtatccaatctactacctcctttctttttctgaggactgtcatatattacacttcaagatcaatatagttacaattcatgcatacagatatatcaaaaattgtggcccaaactaagacttggttgagaacactttgctcaaataagcttttattggaatatattgattatgcataataatgtcagcattacattttcatacatgcatataatatgtttaagtcaaattctcttcgtttggcctctgtcacttctattgatcttttttcctcctttcaagctaatatcatgcagtgtgtgttgggggaagaataggacagatgtagagatggacaaagctttgttagagttatttacaggaacatgggaaactgatataaaccacataaggaaatgtctaaaccacataaggaaatgtctcttcttcctccaagagccattagctgccaataactccccagggcatccatcatgagtgctcctctcctttgggtgaaaaagcatatgtttttatttgctgactggggtcctttgacatcgaccttgaatgtcagtagtatttcacatattttcatacatagtgaagtttatttactaaaaatctcagtgcccatttttaataagacaagtgaggatagtgaatatcagtgtttagactgttgaggttacaaagtcatgaccttcatttagagagagttttagaaaaattattcatcttttggctgatatttattgaggattacttatctttgcctctatgagctacttttcttcaagactgctaatacaaaataagaaaaaaaaatgtagagactagagatgcctcagcatttaaagtctgtactgcacttgcaaatgactggagttcagtttccagaatcaagacgccctcttctggcctcaggcatccacacatgcatgcacatgaacatataggcatacacataaacaaaaatgaaataaatattaaaaagggaaatggaggtaacaataaattatagtgaatcctgtgagaactgttgtatttatttagtcatatacaactactatttatatgcacataccataatattattgttattccccagaaaaaaaagtatatatttcttgagtttaataatagaaagtgaatttgcatgtgttagatgaaccataagttacaaggaattttcacctgagctgtcaggcaacttttctatttgactggatttaaatgttgatgccgttaatttcaagggtctatattaacaatatttctcatttttgttttatttttctagtgcttctactgagggactattgaatcgtgattgcatctcatgcaactttatgaaagaagattgcacgtattttgatgccagctttagccccatgaatcaacatttcttgttattctgtgaaggttagatagtctatgcttttcaataggatttactgcatacactcggtttaaccaatttacattaccatcattattaggtgtttatatttcatgagattcaaggctcagtccactatttcacttagaggaggctaaaagannnnnnnnnnnnnnnnnnnnttgcgggtgtcaggcgactcagctggcaaggtagcgcagggctcgagtggagtggaaggggtttgtgccccagatcaagcccgggtagcctgcttccctatgtactgcagtctcaagttccgcgcgattggattggggcaggcgctgtgttccactcaccagaggtcttagggtcccgtggggagtcccgtgtgggcccttgcgggtgttgggcaagactctgctggcaaggaagcccggggctcgagtcgagcggaagggacttgtgccccagatcaagcccgggtagcctgcttccctatgtactgcagtctcaagttccgcgcgattggattggggcaggcgctgtgttccactcaccagaggtcttagggtcccgtggggagtcccgtgtgggcccttgcgggtgttgggcaagactctgctggcaagaaagcccggggaaagtatatatttcttaagtttaataatagaaagtgaatttgcatgtgttagatgaaccataagttacaaggaattttcacctgagctgtcaggcaacttttctatttgactggatttaaatgttgatgccgttaatttcaggggtctatattaacaatatttctcatttttgttttatttttctagtgcttctactgagggactattgaatcgtgattgcatctcatgcaactttatgaaagaagattgcacgtattttgatgccagctttagccccatgaatcagcatttcttgttattctgtgaaggttagatagtctatgcttttcaataggatttactgcatacactcggtttaaccaatttacattaccatcattattaggtgtttatatttcatgagattcaaggctcagtccactatttcacttagaggaggctaaaagagggcatcagattttctggaactggagtaggtggttgtgaacttctcaacttgtgtactgggaactgaatccacattcttttcaaaggataatatatgccgaaactgctgagctggctctctaatatgctcaaaaaaatnnnnnnnnnnnnnnnnnnnnattgaatcgtgattgcatctcatgcaactttatgaaagaagattgcacgtattttgatgccagctttagccccatgaatcaacatttcttgttattctgtgaaggttagatagtctatgcttttcaataggatttactgcatacactcggtttaaccaatttacattaccatcattattaggtgtttatatttcatgagattcaaggctcagtccactatttcacttagaggaggctaaaagagggcatcagattttctggaactggagtaggtggttgtgagcttctcaacatgtgtactgggaactgaatccacattcttttcaaaggataatatatgccgaaactgctgagctggctctctaatatgctcaaaaaaatctttagaaatttaaaaattaaagttcatgcatataaaaatggatatataaagaggtagatgattattttgaaaaaaaaacagtacaatcataatttagctatttttttttaaaaaatatgccttcctcagaagaagtaatcttaatgttaggaattgaggatcaatagggataaaagagccaactgcactggtaaaaaccactttacttgtaacaatgaggacttgaacttggttcccagaagtcccactaagaaatgttgagtatgatgacatggatttataatcccaggactgaggaaaagagggagagaggcaggtacccaagggcttgctgatatccagcaccacttacctggcaaatttcaagtcaggaagagaaatcatctcaaaaaagttaaaaatcaatggcatctgaaaagccatgcccaaggttgtctttgaccacgacctgcaggttcgtgtgcgcgcacacacacacacacacaaactcacacacacacacacacacacacacacacacacacacacacactcacacacacacacacacacactcacacacacacaggcacaaacatacacatacacacacatacatacacacgaacatgttcacacagaacacccttactcgttcatataaggacttaaaatttgtgtgaactcacttcctctatttcttttcatttggtgctgagcaatggctcccacctcttattctttttttgtcttattcttttgtcacagcatagcctcacatggatatatcttgagaaattgtacaagaacacaataaaaataatcattttccctttaatgcagcactgttcctctcagagacaaagtttacatcattcatccctttgaaatgtaatgagtggcatgagttctgtgtgtttagttttggtttcactgttttttaaatatatagtacttccatttggcaaaagatgttattattttatttatttatttgctgtgtgtgtgtgtgtgtgtgtgtgtgtgtgtgtgtgtgtgtgtgtgtatgtgtgtgtgtgtttgtatacctggcatgatacatatgtggatgtcagagaacaacttaggagtcagttctctctttccaccattggcttggcagcaaacaactttgtatattcagatatctttttaaaaatatccttcatatgtgtatttttaaattctaggtccaaaggtcccagtggtcagccttcacatcacagacaacccatcaagtgagtaccagagaaggcaggtttgaaaataatacttggccttcatcttgggcaagtggaggtttttggttttgttttttgtttgttggtttttgttttctctttcatgtgtcatactctaggaccttcctcaaagggaacgtcagcccaaggaatgctttgtaaaggactttaagttgattttatgtatgttagtaaaacagtaaagtgagtggcttgaatatcttacagcttcggttagatcttgctaattgcagaatctaaatcccatgaaaaaaagattaacatgcatgtgcattcccgcctacttgccgctgagtttcaagatcatttcttcagtcccatgtaggttatgtaaaatcccaatgctttttgtagatattatgacatttcataggtcacaaatatatctatttatattgaaaacactatttgagtgtttgacgtagaggtagagggccttgagttcccttcttttttctgggaaagaaaacaggttgtattccactggttaaaataatatcaaattcacatatagtgataagatactcgggaaatttataaaatatgcggtttactttattgtatttgtactagatatgcagatatatatgtgtgtgtgtgtgtgtgtgtgtgtgtgtgcgtgtttgtgtattcacatatgtccatttatttcatttgtatattcagccaactttgttcgcaaaccatgttatcaaacaatgcagcagataagatggttatatgtttaacttagaatatggaaacttaaaatagagtaaataagtaagtatatgatcaagtcaattttctttcaagatttagcaattcgttttttattttatgtgtatatatgtatgcttatatgcttaatgtatgtacatacactatatgagtacagcaattcccatggaggcagtgggcattagatcctctgtaacaacatttatagccagttgtgagctgccagtgtgagtactagaaagcaaacccaggtcctctgcaagagcagtatgcactcttaactggtcagcctcctctccagtaccctgctgagctaaacttagaatgaatttctacattaaattgcattctcatccctgtctgttacctttgttttctaaatttacaaagtcagaatttttatgctctagtgagctgcataatcttttaaatttacttttatttacataaatgtgaatatattctgtatttgtccaattgccagtagaggttaaaagagtatgtcacatctcctggaaatggacgtttgcactgctcattgtgagctacttggtatgggtgttgagaactgagctcagatcttctgtaagaacagtattaattctttaccactgagttccagtcatatatgctatataatactactaataatttttataggttaattaaagtcagagagcatccctgagataatttattttcttattttattttacatgtaaagaaactgatttgaagacaggtgaaaggacttagctagcatcatatgaatacttaatagccataaatcaagcaaggtgatctgagcttagaataattttttgtcatataagtataaatgtgtaaaactgaagggcatgtgccattctaagaaaggaaaggcggcccatgcttaaccatttgaacctatagaaatccactgcctgttcccatggagatggatcctggattagtgttgttgttttgtatggctgaaacatagctcatcatctatttcaattctatttgcttctctaccccatcttcaggacctatcttaaaggaagtgtggtaatctttttatctctttacatatatagagtcctttgcaacatgtgtaggagttaagataccctacattgagattaattggaagcacctacttactactttgattaaattctataatatgcataattcatagaaatatcaaatttctaaaaccagcctatgccttcatttaatactaaacgttttggtaatcagggcaacagatttggaggacctacttatgaatgcaatatccaagtggagacagaaagaaaaatagaaaagaaaattttgcagatagaaaatcattgtatgagaatactccatcataaccttcttctgagaccagaaacatggcaaccaatagatctgaaaataattttcttgttgacaaaggggtaaatacatttacaatagaagatatgcatatgacctatgagatgtggcagctcttggtgtcacattgcatatttaatctctgtcaaagaatgactctaagaaaagtctttatgagatatgtatttaattttacctcattgttataaagccttgtttttataacactgttgaaaattacagaacatttctcctgacaagttataaaatattaatagagttcccaccaagaaatcaattctgattccattttgatcaaaacgtatagtttttcagttggctgggtgaactaaggtcaggtagttgctttcttttgagggacaattatttacggagacaaagttttttattcaatgacaagtgggtctgtgggttgtaaaaaaatagaagcatcaatgaggcaatcttagctgttccctgagcaatatgaagtaaaatatttctggaaaagaaaattgtgtaaagtagtactatttaaagaaaatgaaaaaaaaagtaaataaaacaacatatcatgatctttcctaatgaattaataaaacaaaagctttattttaatgattataggaagatgttctcagtttatttaaatcagaaatataaagagcatttaagaatataacaaaatcttcagccatcagtttttcatattttcttttccttcttggcaattaaagctgaataaagattagattatctttatgcataatttatgaaaacaaagatattgatgattatactttatataaaactgcaaggaggaatcaggaatataacaaaagtattggaataccttcctagcatacataaaataccaattctatgactatcgccttataacttgggcgtggtgattcgtttctgtgatcctagcactccagcgagagaggcaagatgatcagaaattcaggcctacagaggtagcaagttcaacattcatctggaatcatgagattctgtctgaaaaataaaacaatgacaaaacctaggataattttctcagttagtgtttttgcatttacaagagaactttcaggtaatttttgttttggttgtttctcttttaatattttccaagtgctctattctgtgtattatggacttcatctattgcacaaatacatttttaccttattattgtttgaaacacgcctttctctctctttctgtccatattcactcagttgttccatagtgagagatgtgctcagcaggctctctgtttggaaggtttgctgtccgaggacaggtctattccactgttccagccttaggggatgtgcagttttcttgtcagttcaaaggacaagctgtgaatcgcatataaagaatggggaccaagctccctgcctgtgtatcttttcttctgcttacacggccaacagtattctattattgggacttccccttaaacaccatttttgtcctctaaataccactaatgtgtgacttcgggtgatacacacctccatggttttggtagagaggtcatggggatagggtttctgactctctgtttgcccatgcaggcttttctgttcctaatttcatttgtgtctgtttcttctaccatgtctctttctttccattcttccctgtttcccttagtctatcttccatcactttcacttcctgtttattcttttctcaattcttagcatcctcctcaactccttcacactattctgttctcagtatcttctctttgcgccccaatctctacatttaactgaatatcttagcattaccccatcttatattgtttgatgaggacaaggcatgtttcctaaaacttattttctgatttattgtaatttatggtgtacccatacaattttgaaatgttttaaatctttcttaaatttgttttctcacaactacaactgagttctctgtgctcatagagagatatttattttatgagtaagttaattccacttaatataatagaaaaaattccaactgctgttacagtgatgcaattagtttatttgtaattatgtttttccccactggtaatttataatacattatattaaattactactataacgctcccatgttggtcccactagttgttcttaatcatttatttaattattaattggaatgcaataatctagtgtacatttataaaacaaaatagtaaatatgatttatatttaaaggtataaagatacaaatttaacaaactttaatgtcaaaaaatttgcactaacaacattgtcaagtgatgctggcatcttgtatatgcaaaatatatttgttttatatagaactattcagtgtgcttttataataaatggttaatgttaacggactatacagagtaagattttgtagttttagtgtaagtaagataacctcagtgggtaaaattacctgttgccaagcttataaagttcgattccgcaggtatatgaggttgtaggaaagaactcacaaactttgtcctctaacctccatgtgtgtgcctttgtatgcccatgactatgcacacatgcacatataccactaaatacatacatgaaaatgtaatcatgttttttgaaatgtgaattcacactttataacatttgctatgaaatgttgtgatggcttctttgaatatgtgctacgctttacatagcacaggctggcggagttttaggaaggccaggaaacacactctccacagtctctgtcattggcaagatagttaataagcaggaacttgctggagaagggatcacatacaaaagtcatagctcaatggaataaacagaaatgaattgatctggtacagtgtgataatttcgtttctgaggctgaggataaaatttgtgatactacactgagttggcatgggtgaggccctggggtctattcccagaacagcaagcaatgccagcagagaagctcagtacaatatgtagataattaaaatagaggaaatgcaaagaaggtaaatataacaaatgggatgtcgtctttaaagaaaactaataaagacaaaacccttggaataaaaaccaagtgtaaatggatactatcaaaatcaggttgtgggtttgcaacattaacagaaggaaacttccaaaaacacattaaaaagtgaaactggtcaatgatttctgttgacagtgggccagaatctttgtcatatctctggctgtaatcagacaggcaacaggacttgttaaaatagatgataaaataatagccagaaaataccaaaatattaaaaatgtataaaatgaataaaatttaattaaggaaaattcagtaaaaaatattgatggacagaaaaagaaaaccaaactgcaaaaagctcatgataaaggagaaaacattatataagtgttaggtctaccccattgggcattacaatggttaaatgtacatatatgtatttcatcacacaagtagcaaactgaataacatggaaccaaatattttaaatgtttagtttagaaaactaaagtctttattagtgtattctacacaatataccatactcacacaagctgttccagaaaatggcgatcaaggcagacacagtggttcacacacatgtaatcctatcattttggatgcagaggcaggacaatcccagactggagattattttagcctgtaaagaaagagaccaaatccagcannnnnnnnnnnnnnnnnnnnnnnnnnnnnnnnnnnnnnnnnnnnnnnnnnnnnnnnnnnnnnnnnnnnnnnnnnnnnnnnnnnnnnnnnnnnnnnnnnnnnnnnnnnnnnnnnnnnnnnnnnnnnnnnnnnnnnnnnnnnnnnnnnnnnnnnnnnnnnnnnnnnnnnnnnnnnnnnnnnnnnnnnnnnnnnnnnnnnnnnnnnnnnnnnnnnnnnnnnnnnnnnnnnnnnnnnnnnnnnnnnnnnnnnnnnnnnnnnnnnnnnnnnnnnnnnnnnnnnnnnnnnnnnnnnnnnnnnnnnnnnnnnnnnnnnnnnnnnnnnnnnnnnnnnnnnnnnnnnnnnnnagagagagagagagagagagagagagaggagagattcttgtgtattgtgcattcaggtgtacatattacatttagtatgtaattaacaactaatattttatgattatacagtgtctactcattccatattgctgaaataacccaattcaatgtgactcccttatttaggcaagaatcccaaatgattttgggaaaaataaaacacttggtaaatctgacaaatatttaacaatacagtcatagtaccttcaaatgaacaatacaaaaatgtaaagggaatgcctgagctgtatgacaatatccacaaggataccatagcaggcatcttgtgttacactgaaacacagatgctcctgtgggatctaggaaggcaagtttgctttctccaatcctttctatacaacattctgttagaaaatgttgcagaacaaaagcaagaatagtaagagtgaaactgcctttatttgaagaagatatagttacaaataaaagctttatttttctattataaaaaactattaaaatgagaaaatatataataatttcatatatatatatgtacatatatatatacacacacaaatatactacaaacactataatgattaaaagtagtttaatatacttaacatattggcacaatacgtagaaattatctagttaaaacatgcttcataaaataaattgtgctatatgtctgggaaacatcagactaaaatatctacgcacacacacacagcgtcacttattttagcatttaaaatatctccagatgcatttttatatgtaacaaaatataaataaatttctggcaagttgattatatgcttttatattctatcaacttaaacagttaaactccatttatttattcattatgtggcatcttcatgtcctagcagatactcacacatcaggagacaatgtgccccttttcttaccacgtgggtcctggatcagccttgactattaaggctacaggacacacatctttacctgcagagccatgtcccaagaaaatcagtcaatttttaaacctttatttgattgttagaattttgttatcttttcatcagcagcatttgtaacatctaatactctattgatttaactagcagattatctcttagacaattttatcatacatcttatattttgcctgtttattttttgaataggagtctgtgctttttccagcttattgaacagttgggctataattttagcattctcatctgagactgatattgtgtaggttatattttgggttgttctttccgactacattttgttctcctgagtttttgtatccgtatccaaatgatccaatttttatctcatttccagctacataatttttgtattgtcttaaatattcagaaagagaagggtggtgggatcataattttatttagaaagcataaatggtaattatgatgtactggaaaaatgggaggaaattcactgaaatgaggaagttcagttggaagacacctgcagtggtatcagagacaaagttgagattttcatccatgagtggtacaatactacaatgacaagtagtagtaggctgatattttgtattaatggattgactcctaattattggatagaatgtatctgtccatctgccccttctggtttataaaatgctttagtagattacttttattatttgcaaatgtcattgatgcatacaatgtactttgaccatactaatgataaaaatgtgcccacttaagccgggcgtggtggcgcacgcctttgatcccagcactcgggaggcagaggcaggcagatttctgagctcaaggtcagcctggtatacaaagtgagttccaggacagccagggctacacagagaaaccctgtctcgaaaaaccaaaaccaaaccaaaccaaaaaccaaagcaaaacaaacaaaaaaatgtgccccgcttaacttcatgcttctttttttctctaaaacttcataagttcactttgtgttgctcaggttctcaagggtgtgaggacatccactagagcatgaccaacccacaggtttaaagagatatctctcctcttcggctagcaatcaatagtttgctaactattacctaaaggtgtggaatttttaggccctccacattccattctgaaatgtcactgactttagcttgtgtaggaaacaatggctgctgtgagttcacaagtacaataatttctatcatgtccagaagacattgttttatgttggtccaccttgatttgtgattctaataatctgttcttcccactttcctgcagtaatccctgatccttgggtaggggttggggtgtgatgtgggtgaactatttacgcctggatgttccacagacacttattttatgattttcagggtatttcctcttggaaaacaattctgtgatgaaagaaactattcagaagaagaagctcgcaaagagagagactagaatacttcacattgatgactatggtaaaaattggcacatcatacacccttcaagaacagctttctctgcatcttatacttttacctttaaatgactctccatctttaatattttgctctttctttaaaagaacttcctttacagttgtcctttcccaaagattttatggagaaaaaccagtatgctcttctattaataatgtaagtattttatattttattaaaataaatgaatctaaagatttgataagtatactcttgtgcctcacatgacagatttattaaatgaaaaattagaattattctggcttagccagtgttctactttcttttctgctcttggtaaaatacatcttgatgaaatgcaacttaggaaaataagtgtttatttgggtagtaagtccaaattacagtcatcattgtgaagaagtcaaggcagataaatagctacttgtttcatatccaaaatcaagagcaaagagaaattaattcatatatgctctttcagtgtgttcagctgaatttctccattctgatttagttcaagatttcctgcctagagaatggtgatgcccacagtggattggatccttccacatcacatcaatgcaatctcttgtagatgggcccagagccaagtggatatagataattacctggttaagactctcttatgagatgaatctaagttctgttaagtagacagctaaaaactcatcatcatagctaggaagactgtcaacttaatgggtgccttattgtgtgagaatgtatgtttgtttgtttggttggttagcttgtttgttttgatacatcctcaatattataacatatctgtttctgttatttgaaatattgatacaaggcagcttggtttgtgtatatctgtttagtaattattaaagtactgaattcttgatcagtgattttacaaagtgaacacatacactgtttcatttttaaatagcttgtaatgtctgtgttgctcttttatttcacattccttgacttgtggcaagggaaagtaagtctgtttaggaaaccagattctaagaatatacagctttacaatttattcatacttctttttatgagatcaggactgtgtagacttcagcattgagatactaatacctcattgtaactgatgccatgctcatttagtcttcagtgccaaaggcttattagttactgatttactaagaagcctggaagcatattgattcacaatgctttacattatccagaattaaattcagtgagttagtacgggcaataaaaaaaaaaaaagaaaatgtcatatgttttccaagtattctagatgactattctcaagcttagttggcttgtgcaaagtctagtttgccacctcctatcttcaggtctttaggaaagtatcataatttttttcataataattcataataatttagcccctatatatattaaatgaaatggaacacattctttgctctagatctgtgctgtgtctctctaatacatatgatttgtagacatagaatgctggtttacactcttcattataaattatgtaacaaatttgtagtgtgtgtgtgtgtttgtgtgtgtgagtgtgtgtacaggccaaaggtcaatggtagttagtgccagtatcagttgtctttttgcagataggatctctcattacctagaactttctaaggaagcaaggctgggtagctagctctacctccaagctctgggagtacaagtatgcatcatcacagtgaggatactttatgtagactttgagtgctctaacacaggtccagacatcattttccccttcagagccagaagaacctgcaattcccagtggtaattttctatatacccttccttgtctctttcttctaaccagttttattctttgcatatgatatgttgaggaacatactaaagacactgaaataagaaaaagggaaaataaaaaatattgccttagtcattgttgtcaaagtaacttccctaaaggcgacataaacatctacctctccttctaatatctcaagatcaaacttaattatgatttctttagtgctgagaagatccaatgagtttattaggcttactttcagagccattagggaggagttgcaggggttgcatgggtgaccttaaagcagccacactcaaaagtctgttcccagcaggtttgatgacttcatctggctgtctttcccaacatatattctctagaggatgcacactctgagaccagggaaattggtgcagaatttcatgtgatttggcggggtgattgtgtacttgggtgagggttccatgatcctcttctccctctcctctcctctcctatgagtaggctcagcagaaattaaaacagtaacagtttagctaggcaaatagttctgtattcagtcatgttcccttttggaaacagagattctgttgttcttgttactttgtctcaaatttattacaaagcaaattttcatcagagaaatgatgctaggtttctcaggatacatgaccaataaaatagaagacaaagaacaatatcatgtttggatcgtggttcctttatgcgaatggatacagagacagttattcatgcttccttgcagggataaggtactcgctggggaaggttggccagatattgagatgttcaccttttgatgtggtacactaactggatcttcctttaaacgtgtacttttagctggttgattatgactaaataatcaggatgtgaaagaatgagttaatttaaaaatctattgcacagaaaatgatcatctgagtctcttttaaggaagcacaccagtaaaattgttggttgtgattagcttccaactggagctcttaggatttccaatgcactgcgtaaggcttctaaactaccattatattgtgaacaaattgtggataacactgtgtccttacatatgcacaatgtacaatgaattttatatgcataatgtttatacaaaacgaaagcgttgtctggggcataaacactttcacttagtgtctaataaattctaagtataatcacacttgtttaataaattgtatataatcatcatgttatcttggacataaacactggcagatagcactttaataggttgtacatgcaatcatgcttttattagagatagtgatattttatacatttaaatataacagtttaaatatgaaatgtgtgatataggacctataaaattatttaacaggtggatgctaccaacaccaatgaaatcatatagtcaggctcatggaatttatattgctaccttctggcttgctgaaagaaagactgaaagcaggtgtttaagttctggttttcatttctattgataggtactgctcacatgatttactaattcactttattctgaatccattgcttaaagatttcacatctaaggaactgagcacaatgtatcatgtataaacaatttatattttaatttctattattaaacatcatttctagacctttatgctaaaaaaatctaagtagacgttgcatacattgaagtatttctttaattgatgttttttgtatttttaagagaaacttaatttgcacagtacaatcatcttcagtcaaaatgttttcctgaaaaatgacaataatttatatttttataactggaaaatcctactccatgtggagttctgtgatattacctagaactgaaatgaacactttttattctaagaaaaaaacatctttttttccagtgatgatacagcttccctttctaaaactgtaatagataattgtgttcttcaattattatgagttaaacattactgagcaaaaatgttcaggtttctactacttaggcataaatgttgatttagtgactatagtatcttcatttttgctgttttgtgcagtagacctggtctacaaagtatcagaaaacatttcttagactggagaaatggttttatagctgagtgggatatctgggatagctagagatgtagttcaattcatagattacttgtgtagcattccagactgatagtgcagtccaaaacctcagcattcaagttgaggaaacaaaagcatccaaaaaattcaagttcatcttagggatatattcaaagtttgagaccaccctaggatacaagaaaaatctctctctctctctctctctctctctctctctctctctctctctctctctctctctctctgtcacacacacacacacacacacacacacacacacacacacatatgcacacacacacacacacacacacatacacacacacacacacacacacacacaaacaaaataagaacatataaaaatgaacaaaacaccatcaatcaatctatctatcaattaatcaatactatgattggattgtctgtcattgaggtcatgggactgtattccttttgaatgatggtgttttctgtaagctcactctcttcaagctctgtatcagtagctgatctattctaggtattttgaatctaggtgaccactctgtcttttgcttggcttttctgtactttagctatcctccatgctctctttttcagttgtctttttgccctctgttaggacaagcatagggacttccaggcaatgtggtgctcacagcaccatctactctgaagaacaactggctcctctagacttaagaaattatttgttcccagctgagtacatcactttgatcttggcttggtgtatatttgctcatgctgcctcgtttgttgcctaacctaaaaaagtgctagtaatatataatggcatatttcttcataatttcctctgtgtccttggtgttaatatgtaatagcagagagtgataagtgtttcacactttcatatgttaaccaagcagctctttcttttgtatcatgttgcctcagcacactaattgcaatattattcatgccccaagaatattgacagaatgcatgagtgaatgaataaaatgaaaaaaaaaaagaatgaatcaattaaccatgaaagttttcaagaatgaggtgaattggagaaagataggatcataatcaatttgagtacttatgtttaaatttaaccttctgggtgaatcagtttctcatttctttagattttctgaattatgctgaaaattgatccttagacatctttgcaccatttttttttacaatattactactgaacttacattatgaagctaataagaattaacatcagtagccattatttacctacacacttcattgtaaaaatgtacagatagcatgctttattctttatttttgtgtgacatatataggcatgttcacgtacatacaggtacacctgtgtgtgggcacatgtccaagattatcatcaacttttattctcaatgactctcttcctcaaagttctcttactgtagttttgccttagtctagctaggtactttgtcccagggaatattctggctccagtctcctattctaagataactgagattacagactggccacaatactagtttggattttatctgggtgctctgtttctgaactacagttctcattattgcctgtgagactctttattccctgaattccttatgtgtaattctcaaagaatcatgcctgcagataatttgttcctatcttaacaggaggaaactaagaatagaatatgtcatgccagtcatcccatgactcatgaaaagggtgaaattattgcttgatataaaagtcatttgtttagatcaaatcctcagtttcttacattaaccatcacagtctgccagtagattttgccaaattataataattactggttgattatgaatgattgatggattgatggtgttgttttttttatatatatatatatatctagtaaaggtcttttgcttctgtgctctttagactttacagctcaaaatgctttcaagattactacaagacctcccactagaccttagcatttaaagtgcaaatacccccaactggtatcttttaatggggaccatgtctttgatcccagggcctctggatcatattctagatccacacattgcaacaccagggagacaaacgtataagtcagggattttagaagctttgtttttttgtttgtttgtttattgctgatttccttgtagtcttattgcatctgtgagatgctaattgtaagcatatgcattacctccctgggaactgttggacatgaaccacaatgatgcttcctctatgctgatgacaacacctttatcacatatgaaatatcccacacctgatatgggaactgaaaatatgctctcctattaaatagcacctttattttctttagaaagtgattttctttcaatactgtcataatagcaaggtaagtatggtaatgcttgttttatagataaggaaaactgaggaccagaagtggtaggtaacacccnnnnnnnnnnnnnnnnnnnnattggggcagatgggacccagaaaaattggcacttgcttgttttgtagaggtatagtgttgtatttttgttacaaaatttggggtaactctctatgtgctcaaggaagtcatgtatagaacatcttctttgagaagccaactaatcatctaaatgaatagaataatgaaaagcagtgggtaagagagcttactactaagccaggagtggtggcgcacatctttaatcccagcacttgggaggcagaggcaggccgatttctgagtttgaggccagcctggtctacaaagtgggtcccaggacaaccagggatatacagagaaaccctgtctcaaaaaaacaaaaaaacaaacaaaaaaaaccaaaaaacaaaaaacaaacaaaaaaatgcttactattaccaagtctaaagaccttaccttgatcatgaaagcatgaaaattattcctgaaaaattgttgtatgaacctatattatgaacacacacacacacacacacacacacacacacacacacactctaaataagtgtggggaatgtataaactcagaacaaaatgcagatgttcaacattttcatcttttaaaatttctttgctggctaaaaacatgttttctttgtgctttgtagaaatgagccacatatgccttatatttaagtgaatattttctaagcaagtcttataattatgtaattgctaaatgttgaagttaccaaattaccaagttttgtagttcctttatttctctgtctcaatgtattgatttgtaagatggttatgctataagccactgctcatcactagcatttggcctgctgtttctgtttatttgatacggcgaagtaaaataaaattaaatatctgtgtttatatggccatatttttatcgataaattgattcctagaatccagttaaataagttggaaaacagaatggcataactactagaagttgtcacaatgccttacctaaggagaagtacatattgaagatttgaatgtggcctgaatgagcaaaagttcatagaaaagagctgatacaaaattactcttcagctaagatatattaggagagggactcacaatctttgacagctgaaattataccttgaagtgtgaaacttgagaaaagaaccccatggtcataggaccctaaagcagagagccttcctttcaaaacctagagagcagtaggaaagagagctaccatgagagatagcaagtgggagcactgaagagagagatggatctttcaatttttaagagcagatggagtgtcagactcttataggttttcaggatgttagcaagttttatacttcttaacatcagcactgtgccaggagtcacagaaggaaacacagggttccacgttgggtaggactacacttcaaagctgctttggttctgggaagcttgcctttcctcagtccctgcttagatagatctgaattctctcacagtcagagaaagaagctgtcactcctttgtcctgatggcaggcataaggagacttggcctgatctggggcttggggggagtcaggcatctagtgggtctgtaatctgacagatgtaattagggtctgttaattttctgtaagttcaccaccattcaccatctgtggatctcaatattttactcaaaggagtcccacaatgaattaattacagtttttattgtatgtattgagaaaattggcacttgcttgttttatagaggtacagtgttgtatttttgttacaaaacttggggtaactgtctatgtgctctaggaagtcaagtatggaacatcttccttgagaagccaactaatcatctaaatgaatagaagaataaaaagcagaaaaatgagatatatcccttgtggctacttttgaaagaggaataaagtgatccagtgaccccttcaatgtcctaaagtgaaattaaagcttaagtactggaccaggaatatgtaacacatctatgcagtcctggaaaaggtgtagtcctgctcacctgagccaccattgcctaagcttcagtctcatcctataagttgaactgatgagtttttagaactgtgtgaaatctgttttagggagatacctctgcttatggcacggtgctgataaccctcttaatttgtttgagtattttccattgaaactgataacatcagtacctatttatatattactccattataaattattttgtgtgtttgggtgtacctgtggatgaaagtacatatgtgtgcacatgcacatagaggccagaacttgatatctggtatattcatcgatttccctctaccacatattttgagagaatgtttctcactatacctggagcttactgactcagataaaccaggtgaatggaaagcctcacaaatcccacccaccctcacctcccccatgtctttattgtcacactgctggaatgaaaggcatggattgccatgactggctatttcacaaggggtgtgacagagacatctccccaatcctcttctacattctgttagccactgtttagactatttttcactctaaaatctaaaaggctttttagtcattatatacatatcaagaagagagtggatctttttgtgcttaccctacttataaatttttctggggtacccgtttaatgataagtgatgttggtacattcctttcaaaatgcaaaggaattggaaaaaatgttacatctctgggatgatgtaaatattaaagtaaatgaaagaaaagttcttctagcctccttccctttctactccctcaatgatgcctttagaaattatctcagaaggagattggccagaggataagaattaatgtagtgagacttgacaacagacatcattaaaagacagtatttccttcttgcttatttccagttttttgcctgggcgatgtccccacggcccttttctgttggttctattctgttattttcatgtgctatctaggatgtttatcccaaggttaatttcgtgtggataatactaacagttcatttttgagtttcaggcctggctcattaatatccaggctgttcactgattcaatctgtgtagagatgagagctcatcttttggctccttgttgcaatatgagtagcaggacagaaagaggtggattttccatttcgtttattactctcacaagagtttttaaatgatatttgtttctggctaaggagaatgtgctggatgccatttagagaaagagcaaaacggtacacaatccccttttagacaagaaagggagtctttaataatcactagtgctggcatgaggaaatatggtataccaaaaaatattgaagaaagggggaaatgtaggagcaagggtaggaaaagagatttctgttatattaacacacattattttgccaactataaaatattattttatcctttcttatgtctgtgtgggaagggagtgtgtccatgtgagtgcagacactatacaagagaggctgcaacactgtgccagatacatggagttcaagtgataggctctctagtaagtggtggaaaccaaactcttgttattcaggagagcaagtgtttttaactattgagccatatctccagtcaccatagtttttaaacaacataataaatgatgcactgaatacaatatgtttttaagtttaaaacactaaaaattagcaaagtgccaaaacggtagtcttccattgtacttgttcttgacccctctttgttgttctggtgtctatagttcaaatttctactcacaaagcaccagtaagactggattctgccaaccataagagccacagtttactttctctgtccctttaaagccctacctctgaatatagccacatcttgtggtgccaggtatcaggaattcactgtgtgaacttaaggggcacaattgctcttattgtttgttacaacagcttttgctcattaagaacattttcctaaaattttagttccatgtaacacctgagggggcaataaagaaactgctaaaatggccattccatgattgggggcaagatttttattgtgtgagagagagggaaagagggagagagagagagagagagagacagagacagagacagagacagacagagacagagaaagagacacagagagatggaactaggcaagatctaacagagtcagacagtgctaaaggtttcacatgggaggtttatcaaaaggattcagtagctgcctcttttggaggggaaggaaaaaggtggctcttatgtaggggccccagtgcatgtggaggaggacatgtgacaggggccaacataggaatgtgttgcctctcagcagctaataagtatttggttgtctatgggttgtctgatggtcccatcatcacagtttgcttgatggtccctttgtcactaatcaggactggctgcaaggttgcttggttgctaagagagaggggaggcagagagtgggggagggagggagagatggagtgggagaaggacagggaaaggaagagaaagagaggagagagagaaggggagagggaagaggaaaggaggagagagagagacagagaaacagaaagagatagattgggggaatctgcaagacttcataccagagagaaaaagaagcagaaaggccatggccatggctatcttggaaaaaaagcaataatgatttgggtagcgggaatttggggtggtgactttgctattatatagaggctgagtaggtgtctgggaagagggaagcctatgaactctaacagcctgggagctactatagtggaggagaagtctgggaagagagaagggccaggagactgaatggactttgtataacaagtatgtgtgagtaaggactgaaggagtttggaggccagcatgggcttttatatgcaaccaaagatagatgataaggaaagtggctcttcctgacagcctgaaacattttttacaggcttttgaaaaattcagtgtcttaggtagtactttactgttttgaagagacaccatgaccaaggcaactcttataaaggcaacatttaattgtagttggcttatagttataggggtaaattgttaaatcactctatgctgacagatagaatacagacagggtgctaggctgtattctacactatgccctactgggtgacaggcttgtgggaagtgcagatgcactgctcagggatggaagaatgcagcctggaattggggcttcaactcagatgagaaacaaggcaggctaaggccaagggggcagcgtttcccaagctcctaagcatccagttggtgctggatactgcatagaatcaggaatgaagggggctcaagcaggcctgtgaggacaattctaggactggggagaggtggaactctggcttagctttgtgtccaggagtatggagggcccttctttgggggatttaagtggctctgtactacaaaggctttccccttggcccccacagtggttcttgatgagagagacagtttttgccttttcaaactgtttattcattgttcattgtgggaaatagggtcatacatcttctcaggatggaccagagattaaacaccttttctcaggaagggatgcttattggataaaccctcagggtccatctaggtacctcattagcatggagaactctgttctctgtgctatatgaccagtggtcacactcttcccacgggggtcatggtcatgtgctccaatacaggagcaaggttgggagtagatgaaactcctatcatcctcaagtctgagaatactggggtttctgaacccactcagcattctcagttgttatatggtaacatggttccagttgtcccaaaaaaaaggccaagagactgtccaagaaagtaacgcattgaccaaaaggccagatgaccataatggttgcattatataggaaaagtcagctctggaacctgtgaggaaccaaatcctaagcttggccttgggaattttaggatgggggtaggatatcctagtcagaagggcactataacagaaagacactaagagatatgagagaacccctgccagcatccactttggtaagttaaatagccatctcagacatttgtcccaggtttaagacctaacagtaccaatggagatcttttaaaaaagaaacactgagaggctcattagatccatcaagtggatgctctcctatgtaacctgtgcctagttttggttctagatgaactacatgagtatgatgatgagtagaataagcaatggtggtgatggtgatggttataatgcttataatgaaagtgaaggcttcggcagaagtgataatgagggtaatgtaaactgttgataagatccctgcatgatatggtaaaggggaattttttgttttattttgttttgctttgtttttgtttcattgtagatatgggggatagaacagacatagacatttagaagagtccagagcagaaagaaaaagatgaaatgaacatgtcccatagacttgatctcatttcgagagaggaaggtgtagatcagaaaggaaacaataaatggaagcagcaaagaggaacatgaagagaacaagggcaaatgagggcataaaggggacaaataagagagcatagcagaaatagcaggattgtaagaagaacaattaggtcagtgaagggaagctcatgaacttaagaagtttacagtagtaaaggaggcaaggagagatgagaagagtcaggttgcccatggggattttaaaatgtttaacaagtacttgtgatactgagggagcctagaggctaacatgagaatgctgtgcattctcagatagttgcttgccccttctaccagtgataagggaaatggctctttagggtagaaaggaacatgttttacaatatctgagaaatgctggctttcatccaacagtcagaatttggggaaatagagtttcttctggacctgccaagaattatgatggtgacgaacatgatgaggatgattttcatggtggtgtgctcagagatcagacatggggtctcctagttgttagacaagtcctctgctgctgaggcacatccccagtacatgtgacttttttgaggacttccctctctacatttcctatattgtggaaaataaaacagtgaacaccgcttgacctaaacattgctggcagtataaagccatcccaccttgcacttacggagaaaagattcaaactttgtaactttcatgtcatcttggcatctggttttcaagattttcagacatttgtgtccctacttcctttcttggttcttagcttgaaagctgaaaaatatttttcttcctttactgtttgtttaacttctcagtgagaactctatcttggacaggaggaaaaccctcaggaaatattaatgcaatatttccttcagagtccaacattctttaaggttgtatacttcctgttaaattatatgaactttccatggctgagttagcactctatcagacccttcaacccttgtaaatcataggcaagacatttatttctacaacacacttgaagacaaccaataaaaatagacttgtctgtcaacttgacagtcattcttcaaaaaggccttttaaaaaagaaaccacatattttctccatttcttctctttgaaaaatgaatttaaccagtgtcagttgtgaggtcttaagctctctgttttcacctcatccttgggactcctcatttcaaactttatatggggaaaatggtttgtcatcaagagtcaaccaaatggttaatggctaacatagctgatttccataaccagttagctagttagtataaatttgaaacagtctgctgaaatgctggttgcccttcttttgatcaagtatgctcatatttgcagggatgaagaaccaggaggccaaatggtgacagataagttccatgttgactgggattcagttcttattgacaccgataatgtcattgtagcaagatttgatggcagaggaagtggattccagggcctgaaagttttgcaggagattcacagaaggataggctcagtggaggcaaaggaccaagtagctgctgtaaagtaagtcagtgcatggcttcctgttgatttccataattgtaaaatctatgcaacagggaatattactccctcagaaatgtcagagatgtctcttttctcaaattagcatgtagctttcttgcatttttaaaagcatctatcactgttattggtgtcataaaggataatcatatttattccttgcaattatagtttactttgtgtgtaaatgtgagaagcaatgcattattatataatttattgacagaaatccactatcaagtatctccacaattaattataactcttattaaaaaatacttacactgggtgtgtggtcatttatataagggtatacacatattgtaccatcaactttggggtcagaggtcaatcccaggtgtccatccttaccattctccctatttgagaaaggatctcttgatgtacaccaggctacctttcccatgatattctgaggcgcttgtgtctctacttcccatcttgctgaagtaactctgggattataagtatacactgccttacctgtatttatgaaggttctagggtttgaactcagattctcacaattgtgtccactgagccatcacctcagtccccagtcaaacatttatacatttttgaggagtgtttgtatatgtctctctgtctgtgaattataaattcaggtatgtaattgactcaagatagtataactatatgtaaatttttttattctttcagatatttactgaaacagccatatattgactccaaaagattaagcatttttggaaaggtaaatagaaatcttgacacacctatatatatatatatatatatatatatatataataaatatatgtacatttcactattcactgtattttgattttatgcattgccctgtaaaacagcataattcatatagtatccattctgtcaattatttggaaggttacttctcaagcatgcagttgatgtctggtattagaaatgaacagtaaaagggagaaacagctaagaataaagactggggtcatgactcactgggaaaagagcttgaggtacaatgttgcgaatgtttctgagataccatatgatccaatatgattgtaaatgacagaaagatttggaaacttcttgaccagctagcatggctctatcagtgagttgcaagttcattaacaatccctgtagggcagagcagaggacaacagtgaaccttgacttcttgattaaacacacacacacacacacacacacacacacacacacacacatgggtacatgcacaatagacatgcaagtataagtccacacacagatacacatacacacacacaggtacatacacacagacacacacagacacatactaacagagagaaagacacagataatgcatatatccacatatacatacacacacacagacacatcacatatacacacagatacatatacacacaaacagacagacacacatgcacatacacaggcacacctatgcaactatgaacacacacatacatatacacacacaaacacacatacagacacaaacacacagagagacccacacgtacagcgttgcattaatatttaagtgtagcatctaaaagaaactgtaaatattgctctattccattcgctactattccttaatgtttcttgtttgttttgctatgttttgctttttgagatgtagtctccctctgtagcctgtgttagaccaagcagtgatcctcctgcctcaacctatgaattactggtatcattagccttgttcgcctgtctgagattcttccctttcctgttagtgtgatttgggaagtgcctgttctggatttctgtagcttttaaagaacatcagtgaggagcaggagacagccccactggagacagcagcaggcctcacactcacatggcctctccctcctttggctgagccctgtgctctgaaggaagcagatggaagtgggtgggagagcaaacctgctccaactttgagctacctgctctttcttcttgttgaactatttttttttttactatctctttgttctctttgttttcaatctgtgaacaattagaaaagcatcatcgtcctttcttctatttcctgttgtttgctgcttcaccaatttctgcacttatcattatttcctaatttcaaaaatgcattaacactttgattgcaagttaaatacctaaggttttctgtttgtttgtttagttttgtttttcatttttagcacgctgcatttcaagtgcaaatatttcattctcagtacccctttgagttactccccagggtctctcccactagcacagttgttaaaatttagtacgatgtcttcaatcccaactttttgttctctctgaagttttttttaaatattttattctgtaggaaagcagggtgggactacttctgtttttttttttttccttaattgtaatagagttgtgatctgttcattgactgaacaacagaagttaaatgacatatcagtttattaacaatttaggaagaactgattttgaaatattacttgtgcctaaatgtgttggtatcaaatgcattccatttagttagacttgtccgtcatggtgttcctagtcataaacttatgtactaatttatttggtttctagtatctggaaagatatgctagcacatcccactataggagctagctctcctcttcctatagcagtttccacgggatatttttcttttttctttttcttttcattattattattattattattattattattattattattattattcattttttacactccagtcattannnnnnnnnnnnnnnnnnnnactccaggtctgccctctggctgttcctcatcccatccccctcatctccaagaagatatccccattcccccaaccaccaccccaccccaccagaccttcccacccctaggagcctcaaatctctccagggttttttcagactgctggctttcctatggcatttccctcctacttagcttcttccagcctttccctaattcaactacagggttccctggcttctatccattggttgggtgtaagtatctgcatctgatcctttcagtggcttgttgggcccctcagagggcagcaatgctaggctcctgtttgttatgtcaccacagtatctgtaatagtgtcaggccttggagccaaattgctctagtctctaggtaacctcctttacctcagtctcttctcaatttttgtccctacagttcttttaaacagaaacaattttgggtcagagtttttgactgtggaatggcaaccccatccctccacttgataccccatctttctactggagatggattctacaagttgtcagcccccactgttgggcatttcatctaaggtccctcactttgagtcctgagcctcactggataattttaaagctcaggaaagttctggatgcatctgtattctggtgaattatagctttattgtttgttgagattctggttatctctgtgtataatatatatacatatatatggattatataatatatacatattacatatacatatatatgcatcagatatccatgtatatattacacataggtgtatacacatatgtatgtgtatacacacacacacatatatatatgtatgtatgtaaatttaacactatgctgctgctgtagctcagtggtatatctgctgagcagcatatatgaggccctggattgaataatcagcatagacagagaagaaaaacataagagaacaaaagaaaaacttcatctttctcattctctttccctggcattgggtactgacactaggcccttgtgcacaccagccaagcattctgtcacaattctgaaggacagtggtacaaaaagcaagatgttgacagggttgggtttctgaatcctccctcccaagcttacagagaaatgattttttccttcatcttgtgtcagctcatcagttaaatgtttataattaaaatttttattaagcaattttacaatatattcatttgaggataaataaaatatctataagaaacaaccttcatgccaagggcgggggggcatggtggtggcgcacacatttaatcccagcactcgggaggcagaggcaggcggatctctgaattcaaggccagcctgttctacagagtgagttccagaacagccagggctacacagagaaatcctgtcttataaaaccaaaccaaacaaacaaacaaacaaacaaaaaaaacaaaaaacaacctttatctgttttataactcttcttttgtcccctacattagaatattattttatatgcatacacatacatatatatgcatgtacacgcgtatacataaaaacagtagtataggcattatgtgtaacttgtttaccttagtgtccctatgaatgacaacttttctcttatttcctaactatcttgttagaatgatggaaagatcttcgcagctctgtgtttacattttaaatgaccatgtgtttttactcagtaattaaacttgaggcttggaaccaaactgagttagtttaaattataaccactagaacctaaccccacctcacctaaatatgtaatcatattttttattttatttttaaacattcttagttgtgaaagggtcacaaaagttctgaatgaaaatggttctgaattgtaggaaagaaagaaggatgtctcaacagttaagaagagatgctttgcaagaccaagggcctctcctctccttaatggccaactaggccatcctctgttacatacatgggatagcatttgaaatgcaaatatctaataaaaatatattaaaaataaaagaatagataattctcctgcaaaggacctaagttccattctcagaatccatatcagtgggcacacaattgcttgtaactctgtctgaaagaaacctgatgtcctcttccgccctctgtaggcatctgaactcatatgcactacactctcccaccaaaccaacacaaatttaaaaataaaacaatttttaaaagagttaagtgtactaatagtaaaacacaaaaaacccatattattgaatttctagttactatagagaaataaatgaaagataagcagtacattatcatatcatgtaatacagccaaagttgggtgatgacaccagtttaactatctctctctctatctctctatctctctatctctctatctctctatctctctatctatctatctatctatctatctattcatctatcacctatttgtttatctatcactatcatctatcttttatatatttaaattgattattggtgtgtgtgtgtaattgtatataaattcatgtacacaattgtgcaatgcacggtacattgcagagtcagagaatcacttcattagagtcagttctctcttcctttgagtgggtttcagggactctggattgaacttagcttattaggcttgcatctttacctgctgcactttccttccaggagaaggtgaagcataaaactccccctagctggcatgagaccaaacagcaagaatctaggagaatggcttctcaggaatggtctcctggttagagataagagtgactataaaatatactaagcttgacttacagaaaggaaaccaatatttatggtttgggctctttctaactgaagaaaatctaagtgtgaaaccagatcatgccatttctggagtttgtgaaaacaatgtgtaaaatcagagctaggagaaggctcagtgagcacagattatgctacataagcatgggaatgtgaattgaaacccacttaaagctggatacagtatgccacatctgaaactccattgctcctacactgacattgcaggtagaggctggaaaattcccagagaattgcaaagagtctgcctggctgactcagtgataaccagaagtgggaagatggacacttgaaattgttctcttatctgagtacatgcatggtgtcatgagagcaactgaactaacacacaaacaagcacgtatatgcatacacacacatcttacgcatacacataaataaaaatgggagaaactatagcaaagtaaagtaacagattccatccagagacacatggtgagaagattgtgttaattttgaaataccattttaaacatgtattttcccttactatttaagaatgtcatgaatacatgtaataatttgatcctattgaggacctatagtcgaatagattccatacaggcagatagacagggtaaacaaggtctaagacaatcaatgaacttttaaatgtttaaaatggcagactttcttgttcttccttctctctacaaaacaaaggttggatgcccctgtttcaggaaaactactcagtacgattttcagatttctaggggcaacagtggactggcactcttgtggcaaacgccagtgtcccataatagctaaaaccagccctttctacaggagaaaagagtccatcccatgccatacatgcaaatgttttggcttttgcagagaaactttatttccaggattgagtacaccactttttaactgcagcagtctgtctttgattccctccccctcacactgtgtgtgtgtgtgtgtgtgtgtgtgtgtgtgtgtgtgtgtgtgtgtttgtgtgtagttgtgcctgaagtaaaacttggctgagtgttgaacacgtgtttttccttcccttttattctttaaatcagttcagaaaagtgtcttttccttcatctctaatcatagttgtatcaacattcatcttcactcttctcctctaagggttcctgaatctctatcacgaagtttcctatctcagaattacatactcttttaaaaacatatgtttatgaccactccatagcctcaataatagccccaggccttgggacctccctttgagctggatccctctttgggcctgtcactggacattttttcctcaggctcctctccatttccatccctgtaattctttcagacaggaacaattatggctcagagatgtgactgggaatggcaaccctatccctcatttgatacctggttttcctgctggaggtgggctctataagtttcctctccctactctagggcatttcatcgaaggtccttccctttgattcctgagagtctcttacctcccaggtctccggtgctttctgaaggctccctccaaccttctatttcctggggttgcctctttctattcgttctgctggccctcagggcttcagtccttttccctcacccaataccagatcaagttcccctctcctctccactcctcaaccagtccacttttcctcccaggttcctccttccctacccatttgtgactgctttcttctctttcccaaataggactgagacttcctcacttgggcacttcagcttattgacctttttgagttcagtgaactctattttaagtatttttttgtttgtttgtttgttttttgcttttttgttttgctaatatccacatatgagtacatacaatgcatatgcttttgggtaactcagaatgatattttctagattcttccatttgcctgcaacactaatgtcctcattcttaatagctgagtggtatcccattgtgtaaatgaaccacatttacagtatccattcttctgtcgtgggacatttatgttgttttcaacttcttgctatcacaaataaggccacgatgaacatagtggaacataaacccctgaggtatggtgggacatcttttgggtatattcccaagagtgatatagctggttcttcagacagatctatttccaattttctgaggaacttccagattgatttcaagagtggttgtaccagtttgcaattctaccagaaatggaggagtgttcttctttcttcacatcctcaccaatatgtgttgtcacctgaggttttgatcttagctattctgattggtgaaaggtagaatctcaggttcattttgatttgcctttctctgatcactaaagactttgaacatttcttctcagccattcaggattcttcagttttgaattctcggtttagtcctacaccccattttttgattgtgctgtttggttatgactgccctccgaaagacccaacaagcagctgaaagagttagatgcagatatttgtacccaaccaatggacagaagctgctctacccctgttgttgaattaaggaaggcttttaaaaagctgaggagaggatgatcctattcaaggatcagtagtcgcaattaatctggacccccgagatctctcaatcactggaccaccaaacagacagcatacactagttgatttgaggctcccaacacacatacagtagaggacttctgggtctgtgttcattcagagatgatgcacctatccctcaagagaccggaggccccagagagtttagaggtcaggtgtggtggggtggggtgggggtatccatgtgaagactgggggtgggatggggaggaggtgtgggatgtgtagcagtcgtaagggtgtttggggggtgaggaatggaatatggagtataaatataaattaatttaaaaattaaaaaccatatatttataatcatgatgtgttacaagtgatattatgtagaatttcacatttatatgtccttttttaaacttttcttgttactctcccttttataagtatagttacaatatcatttaaagattgcatcaaagcccatccatgaaagcatatgtcctgatcaatccaacactgcacatcctcatctatcctcctccaagtgtgtctgtcaattaaatttagatttttacatcacttttatgaagtaggaaaactctgaggaaacattttggtgttacaggtctgtttaatgaaattgcaaattaataacaaattgattggtattttatgcatgaagctaggatgactggcaagtgaaagttgcaaatataaagtttcagtgagtggaagaatgttgataatggaaaaacaaaccctggccaagaatgagcaaagtaacctgagctgttgaataaagtgcacaccatctttaattttctgtgggtcagtatgaggagccataaactcagagtctgcctaaaggacaatatatttcaaacattaagctcagccttccactaattctgttttccaaaagctagttcaggctcaacttttacctcagtgaataaacatgaaatgattgagaggatggtgagcaattaagacttaatttattctaatttctgccagggttgatttctcctttaaaaagcagaagttattattccaaaataaatcaaattaaacccccattttggatttgatttttaaattctacagctttcactatcattaagtcttaaagattacttagcttcattatatcccaagttttcatatttaaaaaatggtgaagcacagcttcccatgaagcaggaagcaaagaatgtgtacacctgaccttaggaagagaactgtaggaggggcttcctccctgcccgagaatctccttagatggactggcttgtttcctcttgctctttgtttttttcctgtcttgttctaagaatctagggaattctagtgggaaaaaaatttctgcaaggcatctctattagtataccgtaaaaatttataatttaaaatgaacagcagctggcaagatggctcagcagacaaaaatgcatgccaaaaagcctgatgccctgagtttaatccctgggacttaccattggaagcaaataagtgagtctggaaaattgtcatctgacttccacatgatccagtacagggatatgcatatgtgtttgcaaataaacacatcaaaattaaaatataataagaaatcagtgtccaaaaatataacagacattcctcttaaagtttgtttaaagtgaaagatcctagcatacctgaatcgtacctctcaagattctgaggcaggaggcagagtccagcttaggctagagagatacttgtgggaaaaaaaattaaaaacagaaacaaacaaataaacaaacaaaaccccaaccttccaatctacttaattactgaattacaccatttattatagaaaggtttctaaggggttttttttctttggtttttttttctgtgtttttttttttttttggtgtttgttttttgttttgttttgtgttcctgaatgatactgtcatgtatatttaaggtctatataccactacacaatgtcacatgtctatctggcaaagtgattgctgtaatggagccctgagaagggacatcattatacactttctccttgtttgtttgttttgcttttgtggaaagaacagctaaaatctgtgcctttggcaggaatcaaacttcagcacattataagttcactatctcatattgtgcctactgatcaagattttgttcccatcctatgaattctgctgaccttcttcaattcctgcacactcctcataccacccctgcaccccagtaaacagcttaattgctttttaaaaataaataagagtttgcttcttcaccaccccatctcctctgttcctttcttcctcttctacttcctttccctcaggctcctcatccctcttctctcagatttatctgtgtcttctgtcttacttcttccctattcctttttccccattctcttttcctacttactaggcgccttatccactggtgagggtttaagaatttaggcatcttttctttctggggcagagggaagatatgcttatccacaggtttccctatagatataaatgtattagaaccacacaaatcctgtctgttttatgtctgacagatttttttctctttatatatgtgttaaatgtatatgtttgtgtgtgaagaggtgcatatatttgcaaatgtgtaactgcatgcagaaacgagaagtcagtcacaaccgtcattccttggacaccatctatcttgatttttgaggcaaggtctctaactgtagtagaactcaccaagtaagctaaactcactggccagccagcccccaggttgctgggatggtccttagtaccaggtcttcacccacttccacctcccaacaccaggacgctaatgtgtaccaccatggccaccgttttagttttataaacttgggttatggaagatcaattttcatacatcatgcttgcacataaaacactttaccatataagctatcgggtggccccagtgtataattactcagaattatcgtctgaaatcatccttatgccaaaaaggtttattcacccccatgcatcagattctgcattcttagagtcaaacattggaatgataggtcctaagcccctgcaagaaatttctagtagagtataaagttgtagtctgtattttaaatgttttacttttctttcctaaatgtacacaagcatcattattcttaatttttctacttgaatacacatgaagttgccttaaaataatatacaaagagtacttcatttcccttgttttaaattatttggagcaattctaggatacatggtgtaaaatcatgatattttgtgatacataattaatttcatattttactcagttattaaaataacctgttgtataagtttttaaacagctattagatctttatatgtacacagagatcttttttgcattcttttttacattttgagatattggaacatgtgcattattaaacagtgatcaaaaggtagaaatattnnnnnnnnnnnnnnnnnnnnnnnnnnnnnnnnnnnnnnnnnnnnnnnnnnnnnnnnnnnnnnnnnnnnnnnnnnnnnnnnnnnnnnnnnnnnnnnnnnnnnnnnnnnnnnnnnnnnnnnnnnnnnnnnnnnnnnnnnnnnnnnnnnnnnnnnnnnnnnnnnnnnnnnnnnnnnnnnnnnnnnnnnnnnnnnnnnnnnnnnnnnnnnnnnnnnnnnnnnnnnnnnnnnnnnnnnnnnnnnnnnnnnnnnnnnnnnnnnnnnnnnnnnnnnnnnnnnnnnnnnnnnnnnnnnnnnnnnnnnnnnnnnnnnnnnnnnnnnnnnnnnnnnnnnnnnnnnnnnnnnnnnnnnnnnnnnnnnnnnnnnnnnnnnnnnnnnnnnnnnnnnnnnnnnnnnnnnnnnnnnnnnnnnnnnnnnnnnnnnnnnnnnnnnnnnnnnnnnnnnnnnnnnnnnnnnnnnnnnnnnnnnnnnnnnnnnnnnnnnnnnnnnnnnnnnnnnnnnnnnnnnnnnnnnnnnnnnnnnnnnnnnnnnnnnnnnnnnnnnnnnnnnnnnnnnnnnnnnnnnnnnnnnnnnnnnnnnnnnnnnnnnnnnnnnnnnnnnnnnnnnnnnnnnnnnnnnnnnnnnnnnnnnnnnnnnnnnnnnnnnnnnnnnnnnnnnnnnnnnnnnnnnnnnnnnnnnnnnnnnnnnnnnnnnnnnnnnnnnnnnnnnnnnnnnnnnnnnnnnnnnnnnnnnnnnnnnnnnnnnnnnnnnnnnnnnnnnnnnnnnnnnnnnnnnnnnnnnnnnnnnnnnnnnnnnnnnnnnnnnnnnnnnnnnnnnnnnnnnnnnnnnnnnnnnnnnnnnnnnnnnnnnnnnnnnnnnnnnnnnnnnnnnnnnnnnnnnnnnnnnnnnnnnnnnnnnnnnnnnnnnnnnnnnnnnnnnnnnnnnnnnnnnnnnnnnnnnnnnnnnnnnnnnnnnnnnnnnnnnnnnnnnnnnnnnnnnnnnnnnnnnnnnnnnnnnnnnnnnnnnnnnnnnnnnnnnnnnnnnnnnnnnnnnnnnnnnnnnnnnnnnnnnnnnnnnnnnnnnnnnnnnnnnnnnnnnntataataaaagtagcagggttataagaagagcaactgcagggaggaaaacatgacctggagggcgtttaggatatggaagcaggtaagcaagtggtctatttggtttgagtatgtctgggtgtgcaggtgtgtggcttcatgtttgcatataagtgtgtatatgtgtgtcttttagttaaaattaggttcaggagctttgagctaaaagccatgtgttaacctggcaaaccacctgaaataaaaatcagacacaggaaaacaatggtggactccacatgaagcagctcatggctggttcccaaatccttctgtttcattgtggaacaagcctctcatagcaatgtaatatgtataaagaaaagaaagagagaaaagaaagaaagaaagaaagaaagaaagaaagaaagaaagaaagaaaggaaggaaggaaggaaggaaggaaggaaggaaggaaggaaggaaggaaggaaaagcaagtaagcaaacctggttcagcctacaaaggaactctttgttctcttggcaactcttctgaaaatctacaattattataaattgtaaaaatgtgttcatgaaataatttaggtagtaacatcattgtttgatgcatggcaatgaagagcatcatgcttacaaaagatgtcaaagtactaagaccatccacatatgtcaacagtagtcacaaaagtcacttattatttaagtgtgtgtcagaacatgtactaagaacacttaatgtcttatttgttctgcccaaaaatgctgccctaaggagttactactttcctaactagtatattagagaaataactagtgggaaaagttgaactttccatggggattttttttgtggctactgtagctcttatccactgcactaaaccctaagcaaagtgaacaaattatatttaaagttcattatctctagacagcaccctagaagattttagtactatttaaaactcccttactaagttgcaggtattactgtaaatcgtatttcttatttgattcaatttcaagtcaggcatttcacatagctgattctatacaaaggttcagagaggcaccatccttgcttgtatataggtgtacacatttccacactcaccactcagtccataggaaacctgatgttcaatgacatttttatgctgatattcttgactagaaaaaaatgacaaactcattcactagttcagttcaactttattgtcccatttagtcctttgaaggaaacaaatagcaaacaacagactttgcattgaaaaccaagcagagagtaatcacctgaaaagttgtttggggggctggagagacggtttagtgaggacaagagcttggattcacagaatccaagtaaagtcagatacagtggtacacctgggatcataatgctgctgagactgtaggtggagacagaaaaagccctgtaagctcactaaccagctgctgggtgtgtccagcagcaaacaagagactctgcctcaaacaaggtgaaaggcaaaaattgacatggaaggttgtgctctatctctatataaattcatattcttacattatacatttgtgtttatcgtgtctctatctatctatctatctatctatctatctatctatctatctatctatctatctctgtcactgtttctgtcttgtgtctctgtctctgtctctgtctttctctatctctgccactgtttctgtcttgtgtatctgtctctctctgtttcggtctctctctgtctctctctgtctctctctctttctctctttctctctctctgtctctctctctctctctctctcattcctcataccttccctttgctcacaccctccacaacagctcatttccatgtctatcttttcagccatgcccaaatacacacatgatggactctttcccatatatcttctctacaaaatccacaagagttatataagagattattctacatcaggaattgcccacataaacctacattcatagtcacatatgcaaaccaagaaatttatagttatttagaattggttattttccttattaattataatagaaaattgttcagaaatatcttgcctatatttaaaataaatgactatttggactgtttatcctctgctgtatagaaagattattctgcaccatatgatgagagcctagggagactcagtccactgataagactgccctggtttgacaaagagagatataaaatgttagcttaaagttatttatggaaatctgaagatatgtacagagtgaaaggaatggcttaggcaggatacaagcaaactacagcacagaaatatttgagtggcaggcacaaggtttcataactagctcagacaaaactgttactaaatacagaactcctgagatatgtattccaaagctccagagccttacattcagacagaaggaacgtggaaggaaaagagagaaagcagttttctctgcatcaaatatttaacattgaataatgagcaatgcactctatcttctcaacacaggaatttagttctaatatgaatttgtaattacattcatctgtatatttcttcattgtttgtgtatgtatgtgtgtacatgcttgtgaaggcatgtgtttggagtcagagggcaacttttggaagtcagttctctctgtccaccatagatggattccattaatttatttcaggtcatcaggcttctgaccaagcacccttttctgctgggcaatttcactgttgtggatttctaatttgaaataacaatgcagagtgtcagtgtcaagatgagtctagattctcaaaatcttcaagtatgtatatgaagatatttcactgcattgatttcagggaagacataaattatctccaatacttattaaataccaaatacatagttaattactagaataaattatctcacacaaactatatctaaatgacctcatatagattggaggaggtagctcaccaatcagaggatcaggtttcagcccctagaacctaaatacaatttaaagtactggaatgacgattgatgcatataatccctgtgtgggcaaggtgctaggcagagacaagtggaaaaatgaagcttgctgtccaggtagtttatcttatttctgaaaaccctaggccagtgagagaccatgtctcaaataaaagtggaaagcacctgaggaatctcacgtaaagtgggtctttacttccacacacactcacaaatgcacgtatacttagctatacacacaggcacccacgcaaacatacacacacaaacagaatgcctttggatgattaaattcaccttggtaacggctcttacgttggtgctctgatttatactgaaaaataaaaaatttcctatggcacttggcagatctctagttagaatcaccagcaggtctttcttccaagtatacaatgtgtgtagagcacttcctttctttgaaaaagctattgagcgtttctggtgctaacagattcatttctttcaaatatcataatttaatattttgcagcaaaagttcatttccagcattcagcagaattgatcaagcatctgataaaagctggggtgaattacactctgcaggtaagccaccactccagaaaaatgagtactaattcttagctttatatcaccttatcagatacttgggataagcaactgaagccatgaaagggtgattttggctcgggattctggaggccgaagttgcacaaatggctttgcctctgtggcaaggaagtatcatactacaagagctcagggaaaagcaatacaactcatttaaaaatgtgtatgtgttggccaacacctatgtgtgtgcctgtgtgagcatgtgtatgtttatgagcatgtatgtatttgtgtgtaagtatctgagtacactcacatgtgcatgaatgtgtggaagcttgagggcagcagcagggcaaataatatcaaatattataacatcatgttcatcattcagagaatgtaatgacatggccctctgtcctttcttgatagagtccacatgtctgatttctcagactggctctgtaaactgcctctttcttcaccaagctttctgaatttcttgtatctcctacctctgcattctccactggctacattttctcagctttaggcattaaacttgaggttggttataggaattaaactagccatagacaaacttacctttcagggtatcctttgaaacctggttagaagtcctcaggactccacaactctcgagaggggcaaaaccaaaatcatagggacaacccaaagaacccagctggtgtgagccatggctaggctagtttcaaccacagctgcaccttgttggctgactaataatcttgagggaaaaatgtcacaggaaaaccagttcccagaaggccctgtgtgaagtcacaatgcccaggggctatcttttcgaggaaatatcttttaagagttcacattttatatctctgagccctctcttactagaatttttctgccttctgacatgccctccaggcaagagaaaggatcctaacttccttcagagataggaaatactgcttcttttgcactttgcatttcaacttcttgggacctatcctatggcagtatttccccttggttgtaaaaatgatcaaaagatttatggatatttttaatagacatgaaaaagtaatgtataattgcaaattttctcaagaaattacttcaagaaaagatatgtctggaccatgtattccagaagaagctgtatgtttagtcaagtatgagcatggaagagtctactcttttggagaacaggagaacaagccctaatttaaataattatttttgtgtatgtgcatcttggtaaacaaaagttcctgaaagaaacagcatcttctactaaaccttctgtaaggctgattcactaactagaacttcaatgattgcagaaaggtgtgaatgtttgaagtggttggaaatcaggcaacaagtttctggggctgtcttccctctcttgagagctattttctattctgtgtgtgagctaatgtatctgtgagcactggataaatctttgggttgtaaaagcatcaagctgcccctaacaaaagtttaagaatgtcatctggtagcatctgagtcatatggcagaaaatttcccactggttatggaaaaatgtatctcttaactgaaagaaaataagagattgtttgttcttgagccaagatgttagtgaccatggcatgggaacatttaggttaccctattccaggctctccaatgtagaagcagttttacagaggtttatagtagcaggaaaaagaaagttataaatcaaggaatttaaaaatacattagtagaaacagcagtacagcaggttataacacaatgaagaaatctcaactataggctcaggttataaacgattaactcttccattgatggagaatggcaggcaacagaaagagagagactgattgggcctgacatgtgcttttgaaacacaaaccccaccttaagtaacatacttccttccacaaaaccacacccactccaagctcctaatccttctaatcctttcaaatgatgccagtccttggtgattaagcattcatatatatatattcttactcaaaccacaagctaaggttgtgataaaggttcatattctaagtaaagacccttaatacaggtttcaaataaagggtgttgaggccccatgctgtatggatgatgagtatcctatagtactttcttgaaatcaggctggttttgatttctatgttgcaagaaaaaatgggaaagattcagccttacagctaacaaatgtccatcatgccagatttaacttctgattgcttagagagcttagcaacttcatctgtggaagagactattagagatttgcaggaagtcgcaggagggtctctggcatttctcttattccagctgtgaggacagagaatgaaagaggcagctgttaagtatagcctgaatagaccctagttcaacccaacagtaacttagtttctcatttatcttcaatgtcataggtctatccagatgaaggatatcacatttcagacaagagcaagcatcatttttacagcacaattctcagattcttcagtgattgtctaaaggaagaggtatctgtgctgccacaggaaccagaagaagatgaataatggactacacttatacagagctgaagggaatattgaggctcaatgaaactgaaccaagagactgtcttgttgtagacgctccagaattctaagggcagcttgaggagataaacctggaacagcacactcagacagtgaactagaccttggagacagacatccacactactgtgctgccaagggtgcagaaggtgtttcattgtaaagggaagttgcaagggttggtttcctgggggaaaaaaaattagtttcacattaaagtaggaatagtgcatgtttccttctgttatccccttttgttctgtgactagttaccctcactttgatttcaatggtcatgatcacctttgcataaagtgcataacgtaccatcagtaccacagtccctgatctttgatggctgagctgcaatctaacatgttaatgtatctttataataagtgcaattctctcattgtctattattatgcttaagaaaatattcagttaataaacaaaaagcagagtattttacataaagttctgtttttaaaaaggaattattaaatgagtcaaggctatgtagaaatatggatttcagcaccttccaaagttcaggcagttgtcagtagatagaatacttttaaatcaacacacacgagtgtttgtctcacagtataatataaatatatatatacacgcacgtgtgcatatgcagacagtgagtctatctttatatgttactcatgctacaaagggtaaactttaatgaattacagtggctactcttttacaggctgcaatggatgcttctttattgagccaaatatgatgagacccttttgtttccagttcagattctagcaattgctttcctataaatgtttgggttatgtttggtattgtttctagtggttaatagttttctagttgcagtttacttttttgaatatgatatcttgtcacatgtaaattagatattaaatattaaattatagtttctgataaagaaattttgttaaacaaatgcaatgccactgagtggcatattgctctcttggtggagaaggcttttttaaacactcaaaccttttacttcaaactctcagtgcagtaaagtcaattctcattttcattataaaagcagaaataagatttcatttttccccagagtctactcagcattccatgtctgctcaatgcatctattgctgttaaactaagcccttactataagaattaaaagaaatcatttttattcattgcccctcacccccagaacacaaacagcagtacgtggtattgcatttaaatggacaggacacggggtaccaaatcctacagtgtgtcagtttggagcaattagtaactgagaatggaaattaaacttaactgtgtgaagtttcagtcatgagagggcagagagctatggtgactgaagttgggtgtgttttcagtccatataacagatcttccagaagatgttgcaaagtctgaaaccaaagtccgatgctcagaaaaatcccagtggtctaatgtctattcacagcctaaatctgatctttgggaaagctgggtttctctgtcctctgaaaaccaggaagaaaattttaaagtaaagaatttcttcagccaccctaggctttatcaactgcacagcctgggattctaaggtgtggacttgaaagctggttctccctcttttttcttcagtgctttgggattgtgtcttcactgctccattagattcaatttaataagggaaagatgccctctccagaaagacacattttagatctttttcaaaggatagtgaacacattttttaaaaaaataggttgtaatgtttccaaggaaagttttgcctattttattaagatggaaatttctttttaggctgatttgaagtccaactgaagctttttaatcaatattttagaattcaaccactagagatttttatgatgcaaaaaaattatgttgtctgaaagatgtggttttattgaatgtctatttgagtaacatttaaaaagtgtttaccttttcctgtccatcatttctcttgtttatggttattatcaatgtttatctattttttgatttatttaatacagtttgtaatgtg

SEQ ID NO: 195 - DNA, 4409 bp, Mus Musculus
ttccgccaattccgagagcgacggggcgtctgtgacatgcgatcgcttgccaagtgacggtccccgagtgtgaagtgcccgcgaggaagtgtgagctccgacgcgggcggcaaggggatgacagccatgaagcaggagcagcaacccaccccaggggccagggcaacccagtcgcagccagccgaccaggaactaggaagtaacagccctccacaaagaaactggaagggaatcgccattgccctgctggtgatcttggtggtatgctcactcatcacaatgtctgtcatcctgttaacaccagatgaactaacaaattcttcagaaacaagactgtcactagaggagcttttggggaaaggattcggacttcataatccagaacctcggtggatcaatgatacagtcgtggtatataaaaccaacaatggacacgtcatgaaactgaatacagaatcaaatgcttccacattgttattggacaactcaacttttgtaacgtttaaagcctccagacactcactttccccagatttaaagtatgttctcctggcatacgacgttaagcagatttttcattactcatttaccgcttcatatttgatttacaacatacacactggggaagtgtgggagttgaatcccccagaagttgaggactcagtgttgcagtatgcggcctggggtgtgcaaggacagcagctgatttatatttttgaaaacaatatctactatcaacctgatatcaagagcagttctttacgactaacatcttcaggaaaggaaggcattatttttaatgggattgctgactggttatatgaagaagaacttctgcattctcatatcgcccactggtggtcccccgatggagagagacttgccttcctgatgataaatgactcgttggtgcctaacatgatcatacctcggtttactggagcactgtaccccaaagcaaagcagtacccataccccaaggcaggtcaagcgaacccatcagtgaagttatatgttgtaaacctgtatggaccaactcatactttggagctgatgccacccgacatttttaaatcaagagaatattacatcaccatggttaaatgggtgagcaacacgaggacagtggtcaggtggttgaatcggcctcagaacatctccatcctcacactctgtgaatctaccaccggggcatgcagcaggaaatatgagatgacgtccgacacctggctctctaaacagaacgaggagccagtgttttccagagatggaagcaagttcttcatgactgttcctgttaaacaaggtggaagaggagaattccaccacatagctatgttcctggtccagagtaaaagcgagcaaattacggtgcggcatctgacatcaggaaactgggaagtgataaggatcttggcctatgatgaaacaactcaaaaaatttactttctgagcacagaatcttctccccaagggaggcaactatacagtgcttctactgagggactattgaatcgtgattgcatctcatgcaactttatgaaagaagattgcacgtattttgatgccagctttagccccatgaatcaacatttcttgttattctgtgaaggtccaaaggtcccagtggtcagccttcacatcacagacaacccatcaaggtatttcctcttggaaaacaattctgtgatgaaagaaactattcagaagaagaagctcgcaaagagagagactagaatacttcacattgatgactatgaacttcctttacagttgtcctttcccaaagattttatggagaaaaaccagtatgctcttctattaataattatgctcatatttgcagggatgaagaaccaggaggccaaatggtgacagataagttccatgttgactgggattcagttcttattgacaccgataatgtcattgtagcaagatttgatggcagaggaagtggattccagggcctgaaagttttgcaggagattcacagaaggataggctcagtggaggcaaaggaccaagtagctgctgtaaaatatttactgaaacagccatatattgactccaaaagattaagcatttttggaaagcaaaagttcatttccagcattcagcagaattgatcaagcatctgataaaagctggggtgaattacactctgcaggtctatccagatgaaggatatcacatttcagacaagagcaagcatcatttttacagcacaattctcagattcttcagtgattgtctaaaggaagaggtatctgtgctgccacaggaaccagaagaagatgaataatggactacacttatacagagctgaagggaatattgaggctcaatgaaactgaaccaagagactgtcttgttgtagacgctccagaattctaagggcagcttgaggagataaacctggaacagcacactcagacagtgaactagaccttggagacagacatccacactactgtgctgccaagggtgcagaaggtgtttcattgtaaagggaagttgcaagggttggtttcctgggggaaaaaaaattagtttcacattaaagtaggaatagtgcatgtttccttctgttatccccttttgttctgtgactagttaccctcactttgatttcaatggtcatgatcacctttgcataaagtgcataacgtaccatcagtaccacagtccctgatctttgatggctgagctgcaatctaacatgttaatgtatctttataataagtgcaattctctcattgtctattattatgcttaagaaaatattcagttaataaacaaaaagcagagtattttacataaagttctgtttttaaaaaggaattattaaatgagtcaaggctatgtagaaatatggatttcagcaccttccaaagttcaggcagttgtcagtagatagaatacttttaaatcaacacacacgagtgtttgtctcacagtataatataaatatatatatacacgcacgtgtgcatatgcagacagtgagtctatctttatatgttactcatgctacaaagggtaaactttaatgaattacagtggctactcttttacaggctgcaatggatgcttctttattgagccaaatatgatgagacccttttgtttccagttcagattctagcaattgctttcctataaatgtttgggttatgtttggtattgtttctagtggttaatagttttctagttgcagtttacttttttgaatatgatatcttgtcacatgtaaattagatattaaatattaaattatagtttctgataaagaaattttgttaaacaaatgcaatgccactgagtggcatattgctctcttggtggagaaggcttttttaaacactcaaaccttttacttcaaactctcagtgcagtaaagtcaattctcattttcattataaaagcagaaataagatttcatttttccccagagtctactcagcattccatgtctgctcaatgcatctattgctgttaaactaagcccttactataagaattaaaagaaatcatttttattcattgcccctcacccccagaacacaaacagcagtacgtggtattgcatttaaatggacaggacacggggtaccaaatcctacagtgtgtcagtttggagcaattagtaactgagaatggaaattaaacttaactgtgtgaagtttcagtcatgagagggcagagagctatggtgactgaagttgggtgtgttttcagtccatataacagatcttccagaagatgttgcaaagtctgaaaccaaagtccgatgctcagaaaaatcccagtggtctaatgtctattcacagcctaaatctgatctttgggaaagctgggtttctctgtcctctgaaaaccaggaagaaaattttaaagtaaagaatttcttcagccaccctaggctttatcaactgcacagcctgggattctaaggtgtggacttgaaagctggttctccctcttttttcttcagtgctttgggattgtgtcttcactgctccattagattcaatttaataagggaaagatgccctctccagaaagacacattttagatctttttcaaaggatagtgaacacattttttaaaaaaataggttgtaatgtttccaaggaaagttttgcctattttattaagatggaaatttctttttaggctgatttgaagtccaactgaagctttttaatcaatattttagaattcaaccactagagatttttatgatgcaaaaaaattatgttgtctgaaagatgtggttttattgaatgtctatttgagtaacatttaaaaagtgtttaccttttcctgtccatcatttctcttgtttatggttattatcaatgtttatctattttttgatttatttaatacagtttgtaatgtg

SEQ ID NO: 196 - protein, 585 aa, Mus Musculus
MTAMKQEQQPTPGARATQSQPADQELGSNSPPQRNWKGIAIALLVILVVCSLITMSVILLTPDELTNSSETRLSLEELLGKGFGLHNPEPRWINDTVVVYKTNNGHVMKLNTESNASTLLLDNSTFVTFKASRHSLSPDLKYVLLAYDVKQIFHYSFTASYLIYNIHTGEVWELNPPEVEDSVLQYAAWGVQGQQLIYIFENNIYYQPDIKSSSLRLTSSGKEGIIFNGIADWLYEEELLHSHIAHWWSPDGERLAFLMINDSLVPNMIIPRFTGALYPKAKQYPYPKAGQANPSVKLYVVNLYGPTHTLELMPPDIFKSREYYITMVKWVSNTRTVVRWLNRPQNISILTLCESTTGACSRKYEMTSDTWLSKQNEEPVFSRDGSKFFMTVPVKQGGRGEFHHIAMFLVQSKSEQITVRHLTSGNWEVIRILAYDETTQKIYFLSTESSPQGRQLYSASTEGLLNRDCISCNFMKEDCTYFDASFSPMNQHFLLFCEGPKVPVVSLHITDNPSRYFLLENNSVMKETIQKKKLAKRETRILHIDDYELPLQLSFPKDFMEKNQYALLLIIMLIFAGMKNQEAKW

SEQ ID NO: 197 - DNA, 681142 bp, Homo Sapiens
  misc_feature (1)...(681142): n = A,T,C or G
cgccccagttccaggctctcctgcttctccacggactctgcgggaagttagagcctctgcgtgcgctccggggcccggcgagaggatgcgcaaggtggagagccgcggggaagggggcagagaggtaaaggctgaaggtgccccggggaaccccggcgggcggcccaccgagggagggagaggcggccgggaccaaggaatggggcctcttggttccccattaacgcacgctgaagaaatctgctgcgctcctgacggccgctcaccgggttcgagccccgtcctcctatagccggggcgctcgctggccaaagcgacccgagcaggcgaatgacctttaggcggacggggttttccctctgctttcttgtttcttttgaggagacgggtgtgtgtttgtgaggtggggatgggggaagagtgtcccagacatccgtagtctgctgagcggaacggagcttggggagcggcgaggcattaacgattaagtggagccgggaaggcgctggctttggtgatgtgttgggtttggatgtgtcgcgtctgcacagatgaggtgccctgcgtgggctgagggttattcctgtctctttcccgtccgtctacacccgccaacccctttttgttttggtctttagaaatctgtagcataaccgtaccgtcgtggatccccatctcgtctctgtccctgatctggggtgatttgggacttcggtgtcgctctttttccaaagttggagggtcgggagcgccgagacaccctggcgaggaggaggaggaggaggagggaggctgcgctgagccgggtgcaggtgcgctcacgtttgcatcaattaggaactccgggcagagagagctgcacttaggtcagggattaactgtggacccgcgggacccaagcgctggggtaggaggactggggatctttgttcggagtgcgctgcgaaggctgctggaggcggacaccctcccagcttattgctagcgtgggatagagggagcgcacgcggctaggctccagcagcgactcggcttttcgcgtattctaagcactgaagagcctcttaaggggagctgtccaaatcgcccaggagtggtggcgagacacaggaggccatgccagcgatgctgttattaatattgcagacttggtcatctctcctggcttgcggtttcttttctcctcttccctccccttctcttttctctcacatgtgtttcacacaggtggtggggattactcaatgacttacagctcccttctcgtttattagtgggagggggttgaatgttggcagttcttacaaagcatttgttttcttaaacgatcctgtttgatccatactctgagataagtatgaaaatattaaaacatcatacgttccttccttttataccccttcctcctaatccccagcacacatcagaatgtaaacattggttagcagatatagaaaaataatttcagaacgggaacatggattgaacatcctctttcaggctgacagcccttaaatttcattaacaagccgccgagcctctctactgctctgggaatgatgctaccagtaagaaagattagccaggtgagagtccccacatgaaatctttgctcactaacctgtgacaccagctggttacttgaggcgctgcaaacagttcagtgatggtggaagtgggatgcagaagcagagcagagcagagcacacaggagctgaaaatgtatgtgtagatagtggacacgctgtctatacacaacaaatccccttgtcaggattaatctggtacttaaaattcatatgaagagataggtgcaagctcgaatccatttttcttgttagtgtgcattttttaatagccacttcaaatattcagggagtggctactttgcagaactcttgttttaatagagtattttaagtgcctttctgagtattgacatgatttgaaaatgtcagttttatgaatcttatgcatgtgttctaatagattgattttacaaagaaagtcaactgaaatatacacatggcacctcgcagtgagggtgtttcaagcactcccaggaaatactcatatctagcatatttttgttcaaagcttgacatatgaaacgatggaaaaagaatgtgaatgatttttgtgacagcttaaactactttccgtaagactactaagcttttattagccatattagtcattatggtttaattctgcaattgccacacaactctcgtgcaatactagatataatatagcttcataaagatgtgattagttgtgtgttttctataatatttcataaaaaagattcataaatttaaattaaaatgtacctttatgaaattttacctagtggttaaatagggcacatgttccaacaaatcaatcactatgcattgattttgaatgatttaagctattgcatgtttccaagaatgtcttctagtttctatggtgaagatttttatgaaacctcaaagatgccttgtcctgaggccatcaaacacctatttccacttatagcacagtggaagaccataatccttcctgtaactgaaaatggttatgaaccatataatttggttacagttacagtcctgtagagggctcaaccttcctcttttatttgatctgttagtgtcctctggcacagggtgccatgacaagaggacatgccctccctccctagagaatggtgacaacaagaataggagggaccgtgtagggaccgtgtattttatgaatattctgaatcattggaaatatttttatcatcttagtaatctttcttttaaagattctttgattacaaaatatttatgacagttatttttgttgctttcacaacactccacatttacaaaatatctaaaaacaaatgccttgacatgactagacacaatcatttcttaacatgatcaatatctcaattaacattgaaagagctaagaactctagtggctaattgtaatttattattatttttaaaaatcacttcctgaatgcttgccacaggcagagtactattcttagggttcataaagtaacatttcttgaatgtatttttctatttgattctcaaagcagttttttgagatgagtcctgtttttattcctattttagagatgagaatacagaggattaaggaagttattgtggaagtgagacttagccaggaactcatggaggtctgaagcctcaacttttaacttctatacaatcatgatacaacatatttctattgtaagaatgaaaataattgcaaattatatgtgtatgtgtgcacatgtgcacaaatttaccttgaatataaaacaaatgaataatttgtttaaagcttcaactatacaagtaaatcacagctctgctaattttagttaatatcacgctactgatctaaataatataaaagaacaagatagatcctcataaatttataggagctttttttgatctttgtatcatttgtctctgatgacgagactctcaacgtttgttaaatgagtatatatatatttttaatggtcaatcagacaaggtttagagtttgttcacatttccaccaggtggcacccttctgctgactccagtgggtaaaaatattgcctaaaaagcgtggctgttctctcagctccaaaagcaaaacaaaaataaccacacaaaaacaaaaacaacaaaaacaaaaccatcccactttttagagtatgactaaaaagcatatttttaaaagcaactatttgactacaaagacagcacttgttatgcattttctttaaaaaaatgcattttggtaaaaaaccaatctcttacaattgaacgtgaagctgtcacttgatgaaataattcatgaccagaattgagatcaaatgtgtaatgtgtaaaatgccttctctgaaatatcgatgtgctttagacatttaggtaatatcaacttaaaatgttttaatacagaaattggtattcagtatttttattttacctttggtctagcaaaccagattaaatattcaaacatatgcttaatgaaaaattgcaaaagagttattcttccatgtgccctttgctaatatatacacatcataatttgatcaataaactattgtttttaaaacacaaccatgaaaagagctttcataaatcatattgaaaaattttaattaataaaaaacatattacttcgaattattcaacatataaaatgtcatatttaattgggagtagagttctatataatttggttataaaagataatatacattaaataaagatgttatatggaagtctatgatttgagagaaaatatgcatttcctactctccctgaatttcttatttttatatgtaaatattatatattatataaatttataatataaatatatatataaatttataatataaatatatattatataaatttataatataaatattatatataaggcattttgtttattaagaacatacaacaaatatctcttgcttagaatcttctaatatatctatatatctgtttgattatttcaggatctgagcaaatggtacattttaaaaagattaaattatataaaacaacttaaagaaaattgtattattaaatatcaatgctgcattatcttatgaagcacattacattggaaacaaaacaaccaaatttctcccagtctcagtaaaaataaagcaaattcaaaattttggtttcttgaattatttatgattacagaatgtcttaagctttactacttataggcacattttaaatttacttacagtgtgacatgtagcagacacaatgccagaatgctgtgactaagattgtgagattttgtgctatcaacaacaaatatttattcatcactgtctatgggttatgcactggaagtcacagagtcaagttcatatcccaggtccgccaaagaccagtgtgttttcttgggcaggataactgaatttccccatttcacctgtgaatggaggtgactgcagttccctttagatgtttgttctaacggttaaatgaaataatatgtaggagtttttgaataaggtctgactcataccaagtcttcttattaaatgtgtagtctgggaataagagcctagacaaaatagaaaaaaaaaaaaaaatctgggcctggtgcagtggctcccacttgtaatcccaacactttgggaggctgagatagatggattgagcctaggagttctagaccagcgtgggcaacgtaatgtgactttgtctctaaaacaaacaaacaaacaaacaaaaaacaaaaaagaaaataaaaagaaaagaaagaaagaaagaattatcagggtttagtgacatactcctgtggtcccagctactcaggaggctgcggtgggaggattgcttgaacctgggaggtcaagaccacagtgagctgagattgtgccactgcactctagcttgggcaacagaacgagaccgtctcaaaaaaaaaaaaaaaaaaaagcctcagattattaagccgtgtatagctgatccattattttaagtttacagacaaccatattttgcagtgcacatattagtatgattacacatgagtttttgggtgcatgcaaatattatattaatggatttggacatcaatcctattttggcaggcatccagatttcaaaatattctgttacatcctgactttcattcaatcaaaattgaatagtaaaattctttactgttctactctgtaagaagtcaggctaaaagtaaactttggctaattctcaccaagagttgaattagctgctgaatatgttgcatattgttttcaatgcaatgtacttcccaaggtaatcagcatgagaaagaggatatttaaaggaaagacagatgggatttatagaaatatgtcagggggtgagatttcagtcaatgtagcaggagagtgtgcttggcagtggagccaccaagaacccagggtgcatgtccctactgttatggggaggggcatggaattggattaaacataagtcaaaagactttttcacaaattttttctacacctttttctgtgtaacctttaaacacacatgtatgctccacttattaaaatcatctccatatattttcatacttgctaagtgacttgtgtgtcctaaccaagttcatgtatgactaacattagaatgggggccatatactaagacatacatcaaccaaaaaaaggttggaggtttttccatctgaagacttgtgcaaggtccaaaaagaagccagataaatgataaagggactgtaaacttcttcataaacttatatccttatggatagttagaattgttcttgctctagtgaatgctgtcctgccttgagaagttgtggagtttagtattgattattcccagcatactcttgttttaaagtttttattgacctgatccacaagttttctggcaataaccaatctctgtttatttgtccctatctaatagcacctgttctctaaggcttttaaaattagcacttaccttctttctacacggtagacattcttatcattgactacatattaactcaaggaatggttgtcgttttcagtatagtagagaaggctgggaagtaggttcggtggggagactggggcactgaaaagaaagctcttctattgtagatttatgtttgttaagctttcctaaattcttagaatctcaggcatatccatttgtaatggtaaatgtgtcatccactgccaggctaaatacagaaaactcacttttatccaaaactgataaaataaatattttgaattgttctgttctgtaattgatgtgaacagtattcttttaatgtcttccacaaaataaaaaaattttttttctaagtttttcatgccatagtttatttaaaagttattaaaatattctataacatttttggaattgccaaatgattttcaaatttaattacattttggggagaggcaacgtgatgtaagactgagaacaaggtcaaacagatttcagattgattccttcctctgccatttactaggcaatttataatcccactaaaatcattctttcatcttgaaaagggagaggatgatgagaatgttgcaataattagagaatctatgtgaatgagtttttattgcatctggctcaagcttgaaacctagtaagtattttcattcttaatgctatcgtgcttctagatcatctcagaaggatattttcttcttttacaaaagtaaatttgcacttatgtgaatgaaaatgctgaatatgtgtgtgtacaccattatcaaatatatacacactatacacacacatatatatatatttatgatctaaatgctatggatcttttataggtagattattatagggcgttagatgaaaatgaattcgtgacaacttgactgatttctactatttttagatgaagagtctattttcacaaaagacttagagtcttgtttgatatgttcatggtttaatattctctttccagaagtttggtgcccaggaatgatttacttagaaattctttgcatacgggaacaggtgatattatttagttgaaatttaagaaaagttagttgagtgcataatcaaaaccgactttacatttgggaatgttctccagccaagctatgtattatctaactttaatattattgtaattcgtcatgcttactggttttctcaggtcaagacaaaataactatgtatcagattataaaagatagcaaatgaagaaaagggaggataaaagctatttttattattcttatccccactctctttttgatatgtaaatgaagattcagtttcttattccatctgagaaagtctgctctgaaaacagaaatgtgacaaatctgtattacgtaatcaagaacttgagtggcaggctgccctgtgatttattttcaaataatggaccagagagaccacttgaagttgcattaataatgcttgtacagggagaaataggcctttcttgttattggaacatgggtttacttttggcaagagttgagtaagtgaaaactctgatattcatacttacattaatcacatctcacctccaggaatggttttaatgtaagttaatcaatgcaaaacatggctcttttttttcacttcacatgttttaaaacaagtactagaagtctttcataaagcaatcctttaaatcaatgtgtcacaaatttgcattgataattcttctctcttagacacagaatagaagatgaggaactgagacaatgtttgaatagaggtaaaaatatatctttttgagaggaaaaaaaactgaaatccatgaaggattcctcaaatttagaataggtcatttgtctggcaaaattagtctataatttaaatttcctaggatctatgaaattatgaatagattttctatctacctcactagcttttagggacttcaagggaaaagacgatacgtttcacctgtatgtacttttttagagtactataaaacataagtggtccaataaataaagtgaacatattttgaagccaaacccaacatcttcatcagggttatttctttttttctgatcttaggaattgtgtgtaccctacttcttgacacccatagtgagagtgataggcatgtgtgaattgaaccagaagttgaaatgaaagaaactcccctccctcacatttatgaaggttgcttataattgctccaaaatgagatttgctcaactttaggccactgtggcatgatgagtggctcattattacacatttctatttgctcagcgtcagtatctctgcactctaggatggtacttctcgttccttcatctctctttgcatgaatgccatctccaaacccaaatccagttccctccgcctctctacatttctgagagccatcgtctgtctaagagttgattgactttctgagaaagaatactttgatattggctgggcacagtggctcgtgcctgtaatctcagcactttggaaggccgaggcaggtggatcacctgaggtcaggagtttgagaccaggctggccaacatggtgaaaccttgtctctactaaaaatacaaaaattagccaggtgtggtgccacatgcctataatcctagcgactcaggaggctgaggctggagaattgcttgaacccaggaggcagaggttgctgggagccaagattgtgccacttaactccagtctgggtggcagagcgagactccatcaaaaaaaaaaaaaaaagaaaagaaaagaaaagaaaagaaaaagaatagttggatattggtagcagcattgcctttctaaattatttccttcaaatagccatgacatgaatgataaatgatgataacattcagagaaactgttgtttcctaaatgtcacacctttgtattcaaatcaggaaacagacaatggagaggtgaagtgacttgtctaaggtcacactgttgtttagaattagaagcagtacttgattctgggtctctttccatctagccattcccagattcagctgctggtacaaagcctttggtggtgtcatggtagcacatctgccttccttgccacttaagtataaccttaaaaaaaaaaaacaaaaaaaaaacaagttttaaaatgctttgtgtccataggcaaggctcatttgacatttcttgatttctcctttgtgatgtgctagttctaggtcagtggtccttagacttttggcacctggccaccagacatcacagaagtgcatatgcatcttctgtactttgccatggcaagaggttacacgcaaagccataatgccattctgaacgtaaactgtgaaattcactactccagtgaaatggcagtgccaccactacacaaacagagttgactttctcaagcttcccctcttacactcagcatgaataagcaactgctgatatctacacacagcatctgaaattgcaactcccagcaatgtagtagcaattgggtgaatccctcctaaaggagagatgctcttaacaactggggaatgcatgcaggtaaattttagagctttcttgggacattaatggaaacaacagacttctgatacactgggattcttggtaagaaaggcttctcccccgggcgtggtggtgggtgcctgtagtcccagctactccggaggctgaggcaggagaatggcttgaacccgagaggcggagcttgcagtgagcccagattgcgccactgcactctagcctgggcgacagagtgagaatccgtctcaaaaaaaaaaaaaaagctatttccagaagctgattatttgtatttccagacagagttttcagagcaccaagttccaatacagaccagagaaatgattatatgctaaataaataagtccatgaggataatttttcagacacatgtaattatttttagtggatagacccagggatttctactcatttaacctgacgttaaaccctagaaccttgacatactagtttgagcaacttacccagcctctctgtatctgatgcttcatctgaaaatgaattgatgtttattttgcagaactgttgtgaggatcagcaatgaaataggtttactatccaagaggtgctgaaaaatggtggtgcttattatttggttattaatatgtgttgggttgttataccggacatagacagagcgatggaaaatcaaactatgttggatgttgaagttcccagaagttggaaacacagctttaaagcaccttttgtcattgtttgacattggaagcttaagggcatctttaatattgagctcctgttttggttggtatgcagattatatagagtcctcctgactccaaagcaaacatggattgggagttggttaagaagctgcatggcatccatttttatatttcttatcacgcagagaagttgacaaagtttatattttgaaaatggaaaactgaatatgcatttacttttctgaatttgttttttttcccttccccatccccatggttaaattccgtctcatgcttataatgtattctgcatttggactgcagcttcgttccttctcagagctacagttcttgagctgtaacagcgaatccaaaaaaactaatatggaatcacagatggtgcaaatatttgaaaatagataaatacaatctaggattagctgcttggactcagaaatgtcagcttcacattgcttattggtcacacaaggcaattttagttaaggaaaacacaggacaaagccatcatgatataaaattgctggtttgaagatgtgcagcataacaagcccataattgttatgtaaacctcaaaatgagtcattctgtaacaagaaaaaggtattttagagagatcacaaagcaccaacaggttatatagggctaaaaaattaagcagataccataactcgttcctgttgtacagtaccatctgctgacttccatttacagccaatttttaaggagaaaatatctgttctaatgggtatgctttaggtaggcacatattaaatgacctgagcatgagatgcaacagtcaaattgccagcgtaaaatctgcagatggtaattattagtaacatgcactgtgggctcatagttctgactctgagagtcttaaataatagaatcccattttctctccattatccccctttaagatgtacatatattctgaaggaatcttacaaccgactatgtgattaagttatctggtttactgataaggcagttgagaacgataaaggctgatttgctcaaaatcatacaactgatcagtttggtacagtagaaagaagagttcctcccacctaggttaagagttggtagaaggagcctcactcaattatcagaatcatagaaataactttggattgtctgtgatgatgtcgataaagaaaaaattgatgagaatgtaagtggaaaggttccagctggtttaggattttatttttatttttggtagcaggtttaataagaagatgtattgtatagattctatctgaaagcaataaggttaactatcatggtttgtgtaaagtctaggttttctgcagtatctcattttcctgatgaagtagaagagagtaggaagacccgttccagatcagacatgaagatctataagacagtattgatcgctttcaatgtacatgtttccaaatgagaaaatgtggttctcgtataagtatgtagtgaatatttgtcaataatttaacttattaaaggagccatcaagatggtaaagttggttcaaacagtatttgaggaagagagatttatatagtctgaaaaggaatggcttacaaagtttccaaaattaaatacaaaactggttaatattcaggccataacttttgtgtttgtctttgatagcagacagaaatttttgggtacttatatattttctataattaacatctaactttatagactgtgggcctatgtaatagcaaatagtaagagaaaatagggtacattcccctaaaattctataatcatatgtcggctgattagatagtgccccagtttgacattgaaaagatgaatgtatagttatacttgtttttatttacagttctcgaattgttttcttaacattcccaagctcagaaaaattgtgcaatctgggcctacacttgatgtcacagccaacttcttaagtcatgttattaaagttttctgtaaaccctgtggagcttccagtgtcagatttgattcaccagcagtgaggtcctggaatgcagccagtcagccaacattgcttgtcgggtttgtcccaagaaattgatgcaggtgtctatgaaggctagaggagaacaatttggtagtctcaaatagcttttctttggagaagatgagataggataattgcacacaaggaagtgagaaaccattcttgaaggatttagcaaaatgagattcggatcaagctgcgtggtggtagttgttcctggagatggctacttttagaaactgcccttagggagaagagagattaactaccaacatggtgtgatttaaggcatatcataaattttcattcccttgtgactcgcatctgtgactgtcagtgctctgaaaaatagctcttctcattcatctgtgtagctctggattccaccatgacttcctttgttcctttaacttctggctgggcaggggatattaacaatttatgtctaacttgtatcatttcctgctccgtgattgcttggtatgctctgtcttgagaacccatatttgggggccagagaagatgaaggtcttatgaatttaagaggggtgggggaacaggaagaaataaacatatgaatgggattgggaacctcaagagagaatcaccacttgcacatggggcaagctacttcccttcccttgccctttcctaccagtgttaaaaacaaaaaaataagtttacatgagtacttctgtgcagtgtaaaaaggggttcaatgaataatttggagtttaaaaaacttattgaataattgaaccttagtttcctaaaatatcttttactttctcacagaaaagaccagcgctattcaatagtacatactggaaagatgaaaatgttctgtattggtgttttccaatatgataaccaccagctacacatggctatcatgtttaaacacttgaattgtgacagtgacactgaagaattgtatttttaattgtacttaattttaattaatttaagcttaagtagctgtatgtggctagggctactatatattagagaatcagttttagaacactatccaaactttaatgtgggtatgaatcacttggggatattgctgaaaagcagattctagtccagtgaatgtgagctggggtccaagattctgcatttatagcaggtgcccagatgatgcctagtctgtggaccacactctgagaagtaaggctttatttctcaaaagcaaggattctctaatcctaatttatgtctttagccaggctgacacttgtcctagaggatgagtcagatgagcctgtagcaaaattacaaaatatgactttcaaattataaaaggaaagaatttcagtgacaaaattattagtatttttattattgacagtagctaaaattttgtgtctatactatttatatatgttgtatatttatattttatatattttataaaaaatttaaatatatttatatataaatatatatttgttatatataaacattttatatttataatatttatatatttatattatgtaatgtaatcaattgcttaaattttatttaatcctcaccataaccttatgtaatagattccacttttattccagttttgcaaatgaggatctgaggtttattaaagttaagagactcccaagactccacaggtagtaaatgcagaagttgtcttttgatcacatacagtcatacatattataataaccatcaacttctttcctgttattaagtggaggccaatgatttcccacttgcggctgatcaataaatcatatttgattcttttctacaaaggataatagtaagagccatactagtagttgtagtagtaatgctcactagaactctgtgtacaagttagaactgtcatcctcacttcaaagatgaggaaattgaggttcagagagggaacctctttggttacataatttgattacgaccacataacttgtaggtaggtggcagaactgggttttgaacctggattgtctgcctctggagtccatgcccttgtctgttccagtagacagtttctcatgtgtttggtgagcacctgctcccttaggcaatgcactgtgagcatggctactgccttctgtatattcaattgaaaatggagtttactttgaaaattttaatcatgtataattttatgtctatcaaaaatattttaagacaaaaagtcactctttattgtccaaaatgtataatttagtttgtagcatctttgaagccagtttttaaattcgtttgtcatccatgaagctgactttttaattgtgcatatttagttttagatcttacctccacttttttattagtgaagaactggtgagcactgtaagacatgtacatgtacgtgtgtgtatatgtgtatatattaatgtaaactttacaatttagaaaaacttaaaattgtcttccttgtctcccgtaatgaacttgaacgacaaattggcttcatcattttatgaaagagaaggtgaatgctttgctcccggtttttcagtaacctaagcatctgatttaagccttatttttcagaggtctttgtcattttgtttagttcggcagtcggtgctaacggagtctatttttttcacttccaattttaaataaaacacacaatcttctttaatttctgaataacatattcatgtagttcaaacatcaaatattacacaaatatatacagtggaacgtctccttcccagagttgttccccagctgtgcagctcctcattctgtcattcttttgataggtaatcactaatattattttcatttctttcttccagagaaatgtttgtagtttcaagctagtctagacacattctttacctctccttttataaaaatgttagcagacatgtttattttgaagtgtataacattgcttttgttttgttttgtttttgtttttgtttgtttgtttgtttgtttgtttgagacagagtcttgctctgtggcccaggctggagtacagtggcgcgatctctgctcgctgcaagctccgcctgccaggttcatgccattctcctgcctcagcctcctgagtacctgggactacaggtgcccgccaccacgcccggctaactttttgtatttttagtagagacggggattcactgtgttagccaggatgatctcgatctcctgacctcgtgatccacctgcctcggcctcccaaagtgacattgcttttttttgataaaaaccttgatattatcaaaatagaccctctaaaagttggcttctttaaaaaatgttcctccttttttcatgatgaattagatattatgtgcctcataatctgataagtgatagccagtcttggtgcaggtgtgtttactgtgcccttgcctacaaacagaagggaagagccatgctctccacacattgcctgacaaagagtaggtgctcattaaacacctgagacactgtctaccggagtagacaagggcatggactctaggggcagacaatccaggttcaaagcccggttctgccacctagaagttatgtggccctagtcaaattactttccttctctgaaccacagtttcctcatctttaaaatgagaacaacaaactaacttgcacacagtgttctaatgagcattattactaccacgactactatgaataccactactgtcatctgtggaggagagtggctactttactggtcacccacaatcagcaaatcattggcctctatttaataaagaaaataaattgatggttattatgatatgtatgattgcatgtaacctaaagataactactgcatttattagctgttctgttttgggtatcccttaacctctctgaacctcagctcccaattagcaaaactggaataaaagtatttgatatgttggcatccacttcaatgctatatctgtgcatgtgtgtatgaatatgtatgtatatatacatttatttatatacatgctttccaacttaggatgaggttaggtcctgacataaccattgtaaatcaaaaatatcatcgggtcaaaaatgcatcataaattgaaactatcataagttcctctacctattatgggattgtggtttctactggatgtgtatggctttcacaccatggtgaagccaaaccatcataatcgagggaccatctagatagcattggtctacatatgttaatggggatcttaacaaattaaaagtagaaaagcttcctccttatccccagcattagactcaagtatgtatcccagcttttgcagattataataagttgaaaataatgaatgagcctttcctagtagatgggtaaaagaaaagggctattattgaaatattctgaaacacaattctataccttataagatattcatgttaaggaaacaataaaataatatttagaaattttaatgtagaattgaacaaattccctctattttcttttataataagaaagattatattcctggatgtttgaatgacactgtgaagtctaaaggctagtaatggacataatcccgcattattaaaatgttgtttctgtattattattaaaaaatatagagactctcaatacatgataatgaatacgtggtgtgcttacgttttcttatataccgtgggataagcataatttgagaaatgagaggcatttctttaaacaatagactgtgctttattcacctgtcttagtctaaaaaggctatatgttgctgtcagtcacagcaaaccaccctctcagtgaataaggagataatagtatttgaggtaaggatagaagaccttagactttgcagaattcttttatgtttgcaaagaaaaattacctcgataaattataagcttatggatttttgtgtccttaactcctcatatattgaggaagctaagaattattctaaacttggcaaatttatttggtcaaaatattcctctctattccatcaagtagtaatggaatttaacaaacacaccaggaagaaaaatagcagcattgaaatgttttattgatccgtaaggatgaccagctctaccaagactcgaaaccgtttcacagaaggaatttttagttaaactattcttaacaataggaaaaacaagttatttcttttaagattctgtagagattatagagctttttaaaatcaaataacctcttttctctgaaaaattttaaagaaaaatcaattttttacaatacacctgctgaattattgcagggcatatttggtagctgctaatcttttaacacaaagaagaaacttgtagttgttaatgcttctaggaagtcaagctgctgaatggaaagtggtttttagagttcagattaggctttaatctttgatgtcctgctgggaatattaggagatgtatgggcatggttgaggagaggtacactgatagaaatcaactacgactttgataatttttttcaagaatcttattaagtaacccagacagaaaaggtacatgaaatgttaccaggcagattcctgatttcatattataaatactgaataggtatgacttgaaataaattttaatcagtcactacttacatattcgtacctaaaatttgggtaatggtaccatttgattctatcataaggaatcaagcctcttgtgtgttataatccaggatctttaggtcaaacctcttccttttgtgaattaacctgaaaatcctgtcagatcttctaattacggtgatatagggaagtttaataggaagtcaggattcccttgacctctgagatttcagtgtttggcggagtaccaagctctctgtttcaccagctactgcagagtcttatgacatacccaatggttgaattataagttatgcccctgaatacatctaaccatgacatcctgtcactagaaatgtacatatgtatgtagatacccagactgatgctccaaggaaatgtttctagattgaaagggtgggagtgggcatgaaaaaatgtcctttctgcttatttatctcaatgtccatggaggtaactatttataatggaaggactgagggtaaccccaagaactcttgattataatgatgctctctccctccctccatgcctcccttcctcctgcctccctccctttcttaagcaaaaaagcaacaggaaataaagaagtgaataaaagttgtctcttttcctaaaaatatactttaggaattttacttagtatatttaggaaaatatacttagtaaacacatctcacccctattttgatttacgaataaggacaacttaaaaactatcttctaatatgaaacaccttaacactaagaccttgcaaggtgcatctgttctttttatcctggagattaaaaaataatttacagacaaacagtttgggtgtgaaaatacttaaaatgaacaactttcattatcttttaagaaatcatgacggaagttctggtgaatgtctgtgctaacctgaagatattgagaaagtattttaggcagattctgttttatctgttacttcatatcatatcactcccttattcggtggcttaaaacaaccattttatttctcatgattctgttggtcaggagttcaggtggcttggtgggcagtgcttctggttcaagtgtgttgtttatcttgactgcattcatccggtagctggaaggtcaggaagacttcactcatatgtcttgtatattgttgctttttcatatgacctctctttctttctccacatgggtagtttgaacttcttcatagcatgggtcctagcatctcttaccaggaagttgccttctaaaagggattattccaagtaccgagggaaaaaaacccctgcagatctcttaagaatcaaccttaggagttatggagcctcttttctgccatatttccttggtcaaagcaggacacaggagcagcccaaatacaaaaggaggaaaaatgaatttcttgtttccataagagaaatggtaaggactgtgcagtcatctcggatccaccacagactatcattggctaaaacaacagaactgtatctggatacagacattcactataatagaagcatgtggatgatttaagaacgtttgaatgttaaaaatattataaggataaaagcgatgtcatgatgtcagtgctgtattcagccataatttttcaacacataccgttagccataatctatcaacacatgcagacaagttataatttatagaaaacagtctttcatgtgcagtgatgcttaaaaagataagaatttacattttcactgtaaaatagaaataaatataaagcaatcacctttatatagatgtagttataaaatatatttatttgagaataaatctaatgtaccgcttggttgaaaaagatggtatattccaaataatcttttcgcttcagggaaattatgaccatctagagtaattttgtgtcaaaaattaaaatatacagctagacttctcagaagatgtgtattttaaggaagggacaagtacacagaagttggttattatggccacaaagatactttagttgtgagatataattacattaatgaattctgccactgtgaaatccttgatgttgtcacatttcaggctggaagaagtaattgatctgggattggtgggattccaaagatttcacagaagaaagctttttcagatggttgggggaataatcagggaaaacagtctttggggttatcaggaatataatataattctctatgaaatatctttttaaaattattccagcccctctttgggcattaacagtgcatgaaagtatcctgttctcagtgatctaacctttttaaaggtactccaatgcaaaggactttaacgcaaagtgtagatactcctttctatggaatataaccctagtcatgacaagtttctcctttgtttactccttggaataagtgaaggtgatttaactcagagaggaaggtagggaagctatttcagaaggaagatacctccctaacctgagtgatgggggttacctttcctttgcttcccactcctccacattgcctgttttgcttaaaatatgacttcatccctttttcttcttttgttgtcatgggatattggaatgtaggaaccaggatgtcctgagtggtaaacttagctccactacctgagaaggacgatgtggcatacacccaccccatggacaacaggctgctgggactcctttttggaaacatgaaatatttacacgcacacacacacacacacgtacgtgcatgcgcacacatgcacacagaggcacgcacattaactaagggaaaatttttactttaacacttcccttggaataataagccttgtagaactaattgtggccagattttattcaaagcagaaaataacatagaggaaaattacctactgttgtaatgtgatggttttgtactccaaaatgaacatgagaatgttcattcattttttagagataggttttttattcacggtataaattttgtggaaaaaaaaaatgtcattcttccaaactggttgtgacctgtggaatttgggaataaagccacgtgtgcattttaagcattcctaccttggtgctttgggttaaatgccccccagcggtcatccaatagaacctttttcttgcctccctcaggctttgaaattacctgtttactggtgtctctccatatacctacacatttcttgagggcagggactggactttcttcattttgaatcatcagtgaagagtttcaaaaaatatgtgtgaatttgcatttgtagtagaagtgctttgaagaaaagagagtttgaaatttaggagagggttccatggcaatctttattaagttgattggtatttataatatcttccagtctgtggatcgttttaaaggtatgctaggctagcaaagctgataaagtcagagtgatctcagattgacaggtgggataaataattagacttttggtatataactctcacagagaaaatctagagtgagttgatgcacagtagaaggaaaagagctctaaaagctagatcgaaagagctttttaaaaattaggaagagcaagcaaggaggaggggaatccagaggacaggaggatgtcagagggctgtgtttcatgggggcctctaaaagtgtccatggaaagaacgctagttgcagagctcctgggggagacaggaggagaggtgcacaagccaaactaacaggccagagtgttttgtttgcaacattagttttaactttaaatacagccagtttctttggactcgcagcccagacagggagagggaatagggaactcaacgacttcttgaataaacaattgcaagaaagtcagtaaaacccaatgagaccaataatgaccccacaaggtagggcctgatcctgtgggagattatgggtcagaataaaaacagttagtattttaaacgtgtgttcagtcatctgaatgatataaactttagctattattattatttcttcactataatttgtcaagtggaattcttttgctgcctgatgaagatgatttgtgcacttgagctgaccctgtattggatagggaggaagaagaggtcatttcaaatagaaggggaaagtaaagaaaagttgcgtgaatatctgtagaagacacgtgtgaaatcttatttcttctctttattggacttttacaagacgatggcagcagcagccagggatgcaacaagagtcacattcgctttgaaggctgcccttgaggaatggccccatttttcacaactgtacagaagtcatctctaggagagctgcagcaggcaaagccaagccggctctaattaatgacccaggctaatattggtctttgacgttcttggatattaataaatgttagataagaaaagcagctgtttatctctttgcccaatacaccttcaaacattcgtacaggagatagatatcctaatgtaaacatttgcagcctcacatattgtcgggatctctgaactgtgactgttgacagcaggttgccttaagtaattgcaatgagacagaataatctagtagaagctattgtcatcctaagtaatattttcctgagaaacagttatgaaaaatgaataatagcatttagtaatgcataatgtgagagtcaagaagaatattgaagacaaaggatacaatcatcattgcttgaggaaaactaaattttatatagctgtcctttgttgttatgttaatcaaattataaaataagcgatagtaggagaatagcattgctgtgttataaaattatttttagaattagattagttctgtgacatgagatggatcacagtgagattatacctcatgagtactcaactcttgtaaacactacaatgacatcgttaaatattccatgcttaaaacgcacagcacgttaactcctttatttcaggggttcgcttttatagttagagaaggttttttgtttcttttttttttttaacttttagactatacgcatacaatatattacaggtgcctgtgactcgctctaaaaatgttggaagctgaactgcatcatattcttgagggagaacttaatgtcaagaatttaaatttgcaacacccattaatgtgtatttagagcatttcaacaaagaaatacatttagtgacaaaagttttaaagtattacagaagagtcagaactgaaagataactcatggaattttaatgtaccattttaccaaatgtcctaaaaaatgatgagtactttcacaagtaaaaaagtacctaaaatttattattgttaagaaacattttatgtcaatctatgttaaaaccacaagtttgtaaatttctgaggaaaattgcattaagagtgtatggatattttaggataatgattaaaataatccaagagaaaataacataaatacagatatttaatgatatccaattcggcatagatggatgtggctctaattcagtgtggcaggaactccagaaagctaattttaacaaaagaatgtaatctgaacaatattaaacatgtaggtcactgtatttagagataatcactataattttaaacctattagtaaaggttgtaatgcaagtgtgttgtgctagagttctccaggaattactctcacttctctactgaaaaatattaaaactaccttcaaagataaagctgattacagcataacaaagcaactcactaccacctctacttcataataaatacaccccacattgttgtgttagacatgagtttcacacaatttattgattagttgaacttttaaaaagtctattatgttgacttcatgtctaacccttttataagtgagtggaaataagttcttttatttcttcccctattccctcactctcatcactgcggagctccgttgtttttattatcttattcattcctggtcttagttctcttagctttgttctgttttacgtgtaaacccatttctatgtggaagtttttctatgcagagagagcaggagtatattctttatgcttgggacaataaacatttatagactgaacattatacaccaggaattgtgctaattgctagatttacattgctggaggagacatgatagtcctctcagagcctacggtggaatacaaacagagcagcacagtgattttctgagtgtaacagagcatgcagtcaatgctctgggtgtcttaagagctttgcttagcttatccttggtggtagtagtggaggtgagtcaaagaagtcttcctggaggaggtgacctgtgacctaaaatgtgaacaggagataggacgaagaagggggaaggatggaaggtggtcatttcaagaagtaggaagcagcatgctcaaattgtataaccctcaactgtatagtatttgtggaaaaattataagcaatttatgtgactatcatatacagttctaggaggtggtgtgtgatgaggtaggaggagccatgtcatggaaattgttgtccttgtaggatattcacagcagcttgggctttaccctagaagatggggagacagttggagagttttaagtaggtaactggcatggctgactttacatgcatcattctggcagcaggacacagaaaggacttagaatagttatatgctagggtacagcctctagccagaggatgtcgacaaaggacctggactcaaatcatggtccacaattctgccaggttctagccctactgaattcagaaggtggtgcaaagattcttttttttttttttttttttttttttttttttttttgagacggagtttcgctctgtcgggcctgcggactgcaatggcgcaatctcggctcactgcaagctccgcttcccgggttcacgccattctcctgcctcagcctcctgagtagctgcgactacaggcgcccgccaccacgcccggctaattttttgtatttttagtagagacggggtttcaccttgttagccaggatggtctcgatctcctgacctcatgatccacccgcctcggcctcccaaagtgctgggattacaggcgtgagccaccgcgcccggccggtgcaaagattcttacaattcataaagagaaacaaatccagctatggagaagaacttactttttagtatagaaactttcagatatttatggacatttttcatacatactaaatcttgaagcagagagcgacaaagacatacatttgtgattcaccagcatatacatggtcgtgaaaattgtgaaagtggatggagttttttaggcttggtttatattaatataatgggaaagtgatggtccaggacacctaggaagtttgggagttcaataacaagggaagaacttccagagagagctggaaatggaatctgtaaattttaaagcagctgggaagcagggatgaaatataatgtagtgggtgggagcatgacaaagctcagtaggcctggtgtggtggctctcgcctgtcatcccaccactttgggaggctgaggcggtcagatcgcttgagccaggagttggaaatcagcctgagcaacatggtgaaaccccatctctacacaaaataagaaaaaacaaacaaacaaaaaaattagcagggtgtgatggtacatgcctgtagtcccagctacttgggaggctgaggtgggagtatctcctgagccctgagaggtcaaggctgcagtgagctgagatagtgccactgcactgaagcctgggcaacagagtgagactatttcaaaaaaacagagagacagagagagagagggagagagagaggcaaagagagagagagagagagagagagagcgcactcaggagagaagagaaatctcaggagagaagtaagtttcaagaattttgctgatcaaggaaggaggaagactaggaatggaggaaacatgaaattcagcagactaccttttgaaaatttttgttttatattatttgtatgcttttccttcgtattttttaggataaaaataattgaaagatgtgtatgggctacaggcaaagagctagttgagactaagattggaaatatgggagaaaacgggataattaaagaatcagggtcctgggtgaatgtcaggtaactggatctttctgtataaagaagtttgggctaatatctagaactacattatggtaaattttcacggaaattaactcagagggatcatttccagagtaattttaagcctatagagatattttaagaaatcaggccatattttagggtctctcaagaaaattcacagaccaggtcataaaatacagtaaacgaaatgttttctaaccacacataaagatccttatacttgcttataaaaagagatataggaatttatactacactgcaataccatttatcaccttgagattggcaaaatccaaaagtagtgaatactgtcatgggaattgctgttggaaatgcaaaatgctacacctctttatggagaggaatttgacagtgtctagtaaaattatatatacttttaccccttgacccagcaatcacacttttagacacctatttcacaaacctattggtaaaaatatgaaaaaaaaaagcacacctaaggctgttcactgtacgtctatttgtaatagtgaaagactggaaacagttcaaattttctttaatagtattgttgcacatctatacaaatgcaatacttcacagctataaaaatgattcagaaaggtaactatactaaattttcatcattatatatgtatacacacatatgtacaaatatacaggtgctccttgatttatgatggaattgttataaatagcactcgaacataaatttaattttctcagcaaggcagttttacttctatagaagggtgtgacttgcagatggaacaatggcaagagcacccctgaacaagggaggggaaggcgttcttattctactgctgtgtcattcccctgttgtctagggttggaccacacagtctaagctaatgccgattggctatttttaaagagatcaggggtataagccggagtggcggggtgagtagtttggcaggaaggatggttacagaacaggtgactcaggatgagccgggacagagcaggcgacaaggggtgactcaggtcaaagcaggtgaccaggggaacagatgtgaactactgattggaactgacgggaaagttatttactgaaactagagccaaggggtgaagagaaccaggaagttaaactttaaaatggagcatcaaagaataacagagctgaacatactgacatactgattctttgaagagaaacttggggttcactatatttaacaatcccccatcttgaattttttcagttctttctcttcagacttccttaacatgacttggcttagttgttctgcttgattctctaaaagaaaaaacttctctgaataaggtggaggagaatttagaattaataatgtggaggacgttttagtaagtgctgcctctatgagtctgcgccccagcccacagatgcatgctatgacacaacacccgagaagaacgagtacaccttctacgctgcgagagaagtaagcatcgaggctatgattcctttccatttactgtaccatttttctagccaccctgtgaaggaggcatttactcctcctgagtttttggctaactccttggacagagcagttagaccttgcaatgcctttgttatacttccatcaggggtggtattgtttggatgaaggtgcaacattgagttttcatcatgaggtaaactcctccgctttctgctaatatcatgtctaaggctcttctattttcccaagccctctggctggtagcccctaattgctcagctattcctctaacagcatctctactgtagttaataaaccactgttggtagtaataaatgtaatttattcaaactatgttcttattaattgtcacccaccaaaatattgacttaaatcctgcagctatttgatcttgggttttaaattcatctggtactcctcgtggaactccaatagcatctatgtaaacatgggggtcaaaggacccatgtgaggcacttcttctacaatttttttttaatcatgttgacggaatcctagggtgaaaggcatgaccagttgaactagagcacaagtgctgctctaattactcggcagagtacccagcaagagtcccccgcaataccaccacacatctgctaggggatgaacaagggcagactggtgggtaagctcttggaagggcttggtttcactgcaccctgttaagtctacaaggaatactcgcttttcccccggcggtgaaaggcacctgttgaagttaacatcaggggctggaggccagatggccctcgggggctgacccacagggttcaacctcagggaacagcagtgaaagagtctcgcatgactcatcgccccaggctgtggggttttggaagagagctaccatacagctcatgcccggtccgtgagagaaccgcccaagtggaaaggggataatctgggtctctggcctgcctgtcgcacataacagtcgcttttgtttagcgtgcgaacagaatatttaatccattccagccaagcatttgtgtcctgatatcctgtttcagttgctatagtttgtttcaaatttttaacctctacagaaactactttggttttatcattgggtttataacaagagaaggtttggttagcggagaactcaggagaggaagaaggaggtgcaggaggtgaggaggcaatgaagcacatttcaaaggatcctatggggtccttccctgagacttctgctcctatactatagaaatggcttaacgaaggggaagaactctggggagcagagatggtaatctgtactgggttacagtgatttatctgaccacggggagggctaactcctttagtaaaatgaatatatgtggttttaagaaactgcaagtactagctggggcggtccatccttgctcttcggtgttttacagagcattggaccaacttcggcagagaagctctgctctaggaggacaagatttccagtttacactggaattttcgtcaaacacttctcaaactaacttgtcccagttcacagatttttagtctgaggaaagctaggaaggataaagtacttttctgaggtggagagttgcctctcacctggcaaatctccacagggtataacgaggcaaggatcaaatgtaatagtttgaggcagaattgacgtggttacgttaataagtaggtgaccagcaatagagtgaggaaagaagaaggagtaatagaatagatgaaagagagttacatttttcttagctttagtttggtagggttttcccctaggactatggcccatgacttgggagggggcggcgctttcttgacttgagtattatgggtccatcctttttctggtgtccggactgtggtttcggtagttaggagcactaggtaagatccttcccaggccggttcgagcttttccttctctccagctttggatgaggacgtggtccccaggctggtgttgatgtactggaaactccaggggtggcacctgtgctaaaagacctttagctctgagggaagagaaagtggaagataaaccaagtatataacttctgagaaactgatcttttgtttcaaatgtcgggagatcagtagtagaatgtagataaggcagtccataaagcatctcataataggataggcctatgtctttttggggaacagttcagactctcaacagggtaataggcctttctactttccctgatgaaggtgggtgccagggattatgatattcccatattatatccagtacctgggctaatttcttaatggcacgtgcagtgaaatgagtcctgttatctgaagcaatgttttctattaatctaaacttgggtataatattttcaagcaatgtcttgactgcattattagcagttgtacttggaaagaaaatgtcttctacccaatgagtaaggtggtctactattactaataaatactttagacgaccaattggaggcatctctgtgtaatcaatctaggtactttggaatggccttaagcctggactccttcccccaaggggtaatcttttactaagcaattgtctgtaaccatttggccagggtataaatctctatgcacccataaactctgaggactgcatcacacatggcttggggcccccagtgggtcccttgatgcagttggaacaagatttacctcataaggggtttggataacatttctctcagtctagcaatatccagtttccttctgaattctctttagtacctatttttattagtttttagaccaaagaaaaccaaacagcattttatatttgacagtgcttcctgtatgatttttataccagataagctaaatttcacctttatattagtgggctattaatgttaaactcaattttaataaaaccttgtagacatatttatccaattttaatgtctgaccataacataagatttttatagactctttttaaccctttataatttttgttaaagagcaggttagtgctttaagaaaaacccattgtgctttgattttaataaaaaattaaaataaattttaatttattttaattaattaaataaattaaatccttttacacggaatttcctttacaattaacgtttcaaaacttgcttaaactttaaaacaaaaaaaaaatttttaaccttttaatgtaggtatgaatccacattcttatgcctccttacaatccttttaccaaaagtatattttactttccttacacaccttgcaaataaactgtttcttcaatagttttacattcaggaggccgaattacttttaaattatacaacatttcttgcataaattcccttttataacatgtttcacaactttcacagacaatctttgacatgccttaactttttgacttgttgtaaacatccctttttttaaacaaccagttaatttactttcggacaagaatttaccatgtaagattctttttacatgaactctcctttttttaatgtcaaagatgataacagttcttttccaaagcaagcttcctttatgtctgtggactagactgcctaagaccaccagattagaagttaggataatacatgttacagtgttaacttttagcaaactttacttttgttgaaaacctgtaagtttgggattttaattaaagaaaggcttttctgatgtccagggccatggacaatagctgttccttttggcaagtgaagattatttatacgtgggtgattaattccttgtggaacaggtcttggtctttgctattaataagccctcattcagtccaaatttttccaaatgtatggaccactcaaaaggcgtacttagaatcggtaagatggttccttcctggttctctaagtactttaaatcttggctgagtgcaaacagctcacatgtttgagcagaccaattattaggcaattttcctaactctatttctacaagagtttctctatcaattattgaatacttattgtgtctttttccctcaatcacccgggaggaaccatctataaataagtgtcatccagtcctgaagggagtttctcctaggtctggtcgggcctttgtatggtaattaattaaatctaaaaatgtgtgctctctcttaagatttggatcccctgttaggaaacctgctgggttaagtgaattatcagtggttaatgttaaatcatctttttctaacaaaatagcctcacactttaagatttttgggtcagtaagctactttttggctttctgacttaggatagttctgaccttgtgaggtgtgctcacaatgaagtttcctccaaaagttatttttctactttcttctgttagcaaagccgttgctgctaccgattgaatgcatttgggccatctgcgggttactgggttaaggagtttgttgtttttttttttgagacggagcttcgctcttgttgcccgagctagagtgcaatggcgtgatctcggctcaccgcagcctccgcctcccaggttcaagcaattctcctgcctcagcctcctgagtagctgggataacaggcatgcgccaccacgcctggctaattttgcatttccagcagagacgggatttctccgtgttaaggatttttgataggaaggctacgggttgccagtggccttcgtgcttttgggtaagtatttctaaggctacgcacttgtttacactgacaaaaagatggaatggctgcttgaggggaaagctaggacgggggcagttactaatagatgtttcaacctttccatctgttggatttctggtaatggccaaacgaaggggtttggcccgtcttgcgtgagctttttgtataaaggctttgtttttagggcataagagtctatccatagacaactgtacctgactaattctaaaattttttaagttcacagtgttctgtgaacatttgtggaatctacacggcagaggactagaatggacatttatgagtgatgtttaacataacaatgccacctgttggatacagtaggagattactctgtgtttcatattcttagacactgatctcagcagacacagaatctcgggtcccctttggaaaacagcattttatgaagagcctttgatgcattatgcacaggagagaaatcgtggcggtgaatttcctagtgttgggttttgcctgtcagataaacttaagctgggacagtgtcttttgcagatttggggatatattttggacattcagtgtgcgctcatgatgatcactgactggacaaacttatgctgatgagtcagtattgttattagaagatgagaggggctctgtaatttgaaatctattttctactcctgagacattgaaagggattccaatttggattcaatgtgggtggctttcaagatagttcttttaagatcatgtgatctttgcccttctcacagtttagtgttgtctatttttaaagggtgttaggagtaaatgttgtttatgtttaagcatgataatataaccatacctcaccgccacccctaaaacccgtagagacgaatacatgatagggattgcaactgtggaaggtaaacaaataagcaattttgctcatttgttttttaaaagtgtgactatttgtcttgatagtaataccttgagcttgtgcttcaaaaatctgtccagctattctcttctgcagacatattcacactctcaagcctgcttctgttaatgtgtttatgtgattgttctaacacggtgaatactgcttttgactatatgtacccagaaattattattacatttttttgtaatttacagaaattattattactttttttgtaatttagataacgaaccaaacttgtggaccttttttgttcatttagaagtggtaaaggttgttccgtgccttgacagaattcttaacagctgcctctgccttggttttgctttatgcgcttccttccctcaatggccatggcattgtatttcgggacactcttccctccacaaagcaacagggcaattcttcagtggatattagaatttttctcttctttttctgcaaaccctgatgcacccatacacagcatatcttttgttttattacttccagtttggtgaaaaactggatttgtcatgacaaccaagtatttagtggaacagaagcagagataaagaacacatcttgaaaggaatacacaggatcaatatttcatgtccatctgaagtgttttcagtgttgttgaggaaaaagtatacatctcattgaagtgtcctttttttcccagggaccagatgttcattttatttatcaattgtggacaatccgtcaagcccagcaatatttttccagagatttccccctgtggttttctaatttatttgatatttaggaaaagaagaattgcagctgctgcagaagaattagagttcaacttacgtgtatgtgatcattggagcatgttcctccgtcagacattaaacgtttaacaggacacagtaacttatgcttcgtttgaattttgcatctgcctgcttctcctaactgggtgaagaatgctgacaatgacctactggattagttattcctctcctctattttatgaaatatttcatattttatatttcaaaatatgaaagcatattttaaaattactataagactatatttattttagatactctccacataattagtattgcagagcttcctgcttcaaaatgtatttgtaatttttttctaattgcactgacccataatagctaagattgaacctacatttaaaaaatttaatttcccttcatgttagtgggtaactataaccataaaagagactctttttttaaaagattggacttttacatttattaccactgtaagtgcaatgagataaggcctctgaccatgttcttttggagattgttaaggcattcatgaatcctttggagctgtcagcctgcacttctcactttgtcagaacatatggatgtgtgggtgtggtatgcaagctaactgtcctgaagaagcttgtcaaagaaatgtttggaggaaaaaacaccataacactgagcataagtttgaatatagccatatactagaataaaatatggatatcaggaaagagcttcctatcagagattgctaacattggaacttaaattgcatcttgaaaatggattaataaggtttagcccagtagtggtaagttggtggacattactagtgggtaaacattacatgggcaaaagttagtaatggaatattgaggaaaggagtctgggctgaggaaacgaaggagtaggcaaggccgggaggggtggctcacgcctataatcccagcactttgggaggccgaggagggcggatcatgaggtcaggagatcgagaccagcctggccaatatggtgaaaccccatctctactaaaaatacaaaaattagccgggcgtggtggtgcacacctgtagtcccagctactcaggaggctgaggcaggagaatcgcctgaacctgggaggcggaggttgcagtgagccgagatcatgccactgcactccagcctgggtgacagaatgagactccatctcaaaaaaaaaaaaaaatagaagtaggcaaagaggagaatggaataactggagttgggaatatggactcataaacttacctttaggaggagttactaggagagtttcacatcagcagtggtctaatcaaaaaagccaattaactccagccatttttagtcactgtaatttggctccaaattcaagttttagggtaagatatcttattggctgtatcttcaagttctttaagcattgacatcagattttctgtaacgcctttagagcctgctataaaccctaatagatgactttatctgggtagctagaatttgagatacctgtgaatcttggctgtaaaatttgactcaatttgcatcccatttggatgaagcaacaggatattagggttttgaagtatgcttatgaaaataaatatgctatgacgtttgtaattggtatgattcagaatttaattagataaactacctagcatttctctgtattttcagaatcttattaccaacttttgtagtactccccaaagagcaatttcagtaatttgtagtgtatctctggacgtgataaatgctattatatcactgtgatttgtaatagcagtgcttttcactgtgaaagatttactgagattttctaattgacttagagcattgcctctcaaactctttctctatttcttattcactgtactttctcatcacaacttagtaatcatattaatcttgctttcttggaaatgattcatatatttgcatgaagactaattaaaatacatatgcctgtcctaaatgattaggctaagacttaaatgagcaactctcagcttaaaatcctccagtgattccccagctcgctcagagtagaagccaagcctcttataataggtcgtaacaccctggtacttttctggattcatctcaaacaccctcttactaataccactcagctttatggcaccacttttggttgtggtgaaggcaccaacaaaaatgtttattgtctgaatttggcatgtgtgtgtgtagtagtgtatgtactcacatatctgaaaaatatttaccctttaatataactttctgtcactctgtatatacacctccagattcctccagttcagacatgcatttgcctttgctgtttcactggtctggaattatcttctctcagatttcttcatgtgttactccttcagcttcttaaacacgttgatcaaattacttccagtgattctttccctagagggatttacttaaaattgcatcactttttacttatttattctcttcattgtttgtgtcttctctctgctcatccccccagccccacccagacttaagatcagtgaagaagattttttttcttgttcctttacattactaaatctccagtgcctatgtcaaactccagcatggggttaataaatgtatgtagaatgaaggaaagcctcttccaaatgagtgcttaccatcattattgcctctcaagaagtagatcttaatatgaaaaaggatgggaaagttctccttaccttttcttctaattctttgccatgcttgaaacattaaatggaaccaaatttctagatttatttctatttacatctccaaacatttgcaatccttataaaaaacatggtagaggctaatcatgataatgtagataataatagtagtagtaataataatagctaacatttattgaagacctattaaagttcagatataacttttattatatcattaacagatgttattaatttaataaaacctgtaattaaatttttaacaaacttcaaattcttgatgagcaactgagttgataatcctatttgcccattttgaatatgataaaaaacagccacacttacagtaactttatttatttgtgtgcatattatgtatgcattttttctgcttgggatctgttgtgtatttgtatggggattttagtatatgtagtgtagagactatcactgtcaggtaaattctgttatttcttttggagcctattggcttttaagcactcggcatgaaatatatatttcaaataactattaagttgttatcatctgacttttttaaaactttctacattaagggacttttcattaccttatttgaactactagttcttggtttgaatgtaacaaattcctgggaggcccgttttgaccgcaaagaacaatgtagcactatcttttttaaaataacatacctacttaccaaaagaattgggagaagaaatcttgattcatttaggattagactaaaaagttacattactttttcttttattcattatctttttgtttatagcatgtatcaagactgaagagatgatgattttaaaaagataggcattgtattatgatttgctttttcttcactgtttttataggatgattaaaaatatctggatttcataaggcataattgacaggttgcagatctgagttggagcacatatcaaataatatataaaaccttctgcttgatacttttgagatcaaacattgtcataacacccacagtgttttaaaataggccagaggacagcctcctggatagctgacctttaaccaacaggaagtatataaaatatctgcagagtagaatgactatattccaaacttagattagacagaaatgacaccagctctgggttccatcactgtttctgtgcatccgttgttgcatctgagaagcagagtgctttttgttcccccacacttcatctagtttgaagcaagaaaatttaacagtgcaacaaaacgaactgccttttccagctgaactctatcttctctgacagatggttcggttgggcgtcttttccatccagagcagtgctgtgtttgaagaatgaaagcattgagagagatcatttgttgtatagagcagagtttcaaataaccattactactggcaatctctgctgtaattcctggattttgagataggtgtacaaggaactctgtggtgagattaaacattcagctaatttttttttcccccaaagtcattaagtagctagcatttaattttttatatgtgcagattaaaaatgaaggttaagtaccaacaaaggaagctccgttcaggaaaactctggtatactctttggtgtctttggtggaaatgactattcattatgcggaagaataagactttataagaatagtatttccctaagcaggcacagcacttgagaaggttacagaatacctgtttactctgctaacctaattctctgtcgatttctcttgtcaatgccttttgatattttgacacagaatgttctacctaggaccactctgctgaatataggtcaggctctggactctttctgaacctattctcataaatcgcaattttattactgtttatacttgtctacttgagtcattccacacaatgggaacttatttttaatactaatttaaaccgaggtgctactgagtatcttgcttaacatatttgcagttcctgaagacttcagagttttatcccaaagaaataatgctcatagagaggaagcagatatactagttattccttggaagaggaagaaaacaggaaatggatatttggaaacaagagagacttccatgttcctcaattcatagcaattatccagtcctactttggatcatcctcctaatcctattaagaaaataaatgagactccaggcattacaaaatctgaaaggtttttagaaaaacaagctactctgaaagcgtatctttggtcaacacagccaaacacaactcacagttttaaaaacacagaaccggccgggtgcagtggctcatgcctgtaatcctagcactttgggaggctgaagcgggctgatcacctgaggtcaggagttcgagaccagcctggacaacatggtgaaaccccatctgtactaaaaatacaaaaattagccgaatgtggtggtgcatgcctgtaatcccagctacctgagaggctgaagcaggagaattgctggaacccgggtggcagaggctgcagtgagttgagatcataccactgccctcaagcctgggctacagagtgagactctgtctcaaaataaaataaagtaaaataaataaaaacatagaaccatttggtgattcctttagagacaggtcggatttttcacatcacttcgcagtcgatgaagccttaaactaggacctactaattgtgtctagacataaacagaagaggaaatgagtccaacaagaggaaacaagaatgattctttgtcaagtacactatttcttttcaagagctcatgttatcctcaagttatatggaaatcctttcttgaaaaatgactccacctcctgctctgtatgtgctcccagcccctccttccacagtggagcagtaagagagtgaaggctttatgtgtcctcaagagcaatgattttgcaaattcagaattgctacttcctcaggaaaacttgaagttaaaaaaaaaatccttatttgaagaaggaaaacattagggcattatcgggtgagaacgtctctcatttcctctcacacattagggtctttctttgaaaagtagtgtttttatgtcttaggatgagggtactgcatgattcagggttctcaattttgtgttaaattaatatctgtgcattcttaagatgctatttatcaaggtggttttacatttgatcagaactcagccacagatgcattttcattatttatttttatagagatgtagtcttgctgtgttttccatggtggtcttgaaatcctggcctcaagggatcctcctgcctcagcctcctaaagtgctagaattacagacatgagcacccatgcctagcctacattatataattaattaaaactttaaagcaataaaggctactgaattttaagttaagcaattttctatgacctagaaacataaagtaaaatcactctagtttgtcacaaaatgaaaaatatatgctaattaagaatcagaaaatcatggctttatggaattgaacatattttcaatttgctgattaaactccctgggaattttaaagtcatctaattcagcttcttattgagaattttctcttttaattggacagctttggtctaaatacttccagtggacctacttgcctctacttttcgaggaaagtctatatcagagacacttgtattattttaatgtgtttcataattttgagaatacaaaattggattctgcatagctttacttgcttttcatatttctctatgtaatggggatatttttgaattctagagcagcactgtccaatagcactttctgtgatgagtaaatgttttatttctgtttaatatggacatgtggctaatgagcactggaagtatggctagtgtgactgaattactgaattttggatttcatcaatttttaactaaattaagttgaagtagccacacaagtcttccatatcggcatagttttagaaatattgttttcatcaaggacagagaaagaagaaaatacctttctcttgtttgactgcctaatgggcaaaattccttttacaaacgttgagaaacaaacaaacaaacaaacaacaacaacaacaaaaaatcttttggagttaatgcttattttgcatagaaataaaggcataaaggaaatttcaatatatggccaactcaagtttagaaaacagtcagctctctatggtaactaaccaaggaagagatgaataaggaaggtgtagaaggtggggaataagacctgcttaccagcttaaggacaactgaaaaatgacaagaattcaactgcagtgtccaagacaatgttttctgcaagaatgagtggattttaagtacaaggaagagtgttggcttgagtctggtcttactatgtttttccctctccaaccttattttttcccaggttgttgacagtgtgtaatttcaatagatgctcggcacttttctcacatctccactggagatgagctttatacaagtgaaagtgctactgagatgggaagatgttagataatggcatacgtgcttcttttttaattttttctatgatttgcctccattccttaggtcagcatgaacagattggagagggagatgctgagtgtgtcatactgaactgagctaaattgatcagaactaagggtgatatgctcccaaactactaccctatcctatttacagcttcatctaactagtgaagtaatttttctacctcaggaaaattaaaaagatccacacatacacccccacacccagacatacacatagacacatgcacacaaatccatgaagttggcactttggctttgacctctcatgatcttcttgacctctctatgatctgcctcagcctcattttccctgtccaaacacaaaatattttatactatccaatatattttattatggattttttcttgttaaatttccttttctcctatctattcaatcaaaattctttccctccatggagaggtttccctaacaatagacttctacctaattttcatattaaagtaacttatacttagttgtgaggaagttctctaggttaagaataaatatcatagagaaactttattgtcaaatgaatacctaaatgacaaatttctgtggcgatgggcgagtttaagcagaagagactccccctcacgttctatgaattttcttcagttatcctgatttgacttgattttaggctacttgtgaagaaatagaaattttactaattagtgaaattgtcttctacagttaaaaatccattaaaccttttctgtctatttctgatgtgcagttctgcaaaaactgggccctcttaaaaggctaagtgaccgcttttagtttaggtgagatataaaaacacaagtagcaaagaaagtaatttacctttgtctagagaatttattctctaaatatgcacaaagaataggccatatgtcagactttgtccttagaattcacgggaagaaggaaaaagactaagcctctagcctcttgctattgacaagagcaatagatactacatggattatatagaccttgcatgcagttgtgatgaattcgttgatagtaacagaaaaaaaaatagccttttgacaatgccagcactttacaaaacattttagtcacaactctaatagcaaaacaaccactaaagcagatgttaccaccctcattttagaaatgggaatctgaggctcagggaaatggcctctgtggatgaaaactttaggttttgttcctggcagtagtaacaaaaaaccaaactcactaaacaggtcataaaagtaaggaagcaactcagtttcatctgtctgcctgttctgtcagatagtgacagctcctcccgtggggagcagtgaatacatgagtgagaagactttttaataacagccattctgactggtgtgaaatgacattcattttggtattgatttgcatttcgctgattagtgatgttaagtattttttcatgtttctttggccacttttatgtattctgttgagaaatgtctgttcatgtcctttgcccattttttaatggggttgccttttgctttttgatttgtttaagtatcttatacattccagatattagatctttgttggctgcatggctagtgagtattttctcctattctgtaacttgtctgtttactttgtatatagtttcttttgctgtgcagaggctgtttagtttaattaggtcctacttgtcaatttttatttttgttgcagttgaatttggggacttagtcatagattctttgccaaggccaatgtccagaagggtatttcctagattttcttctataatttttgtagttttaggtcttacatttaagtctttaattcatcttgggttaacttttgtatatggtaataggtaagaatttaattttattcttctgcatatggttagccagttatctcaggatcatttattgagaagggaattttttctttattacttatttctgtagactttgtcaaagatcagatggttttaggtgtgcggtgcggcttcagttggtgggaatgtaaattagttcagccacagtggaaagcagtttggaggttcctcagagaactaaaaatagaactacaatttgacccagcaatgccattactttgtatatacccaaaggaaaataatttgctctaccaaaaagacacgtgcatatgtatattcatcacagcattattcataattccaaagacatggaattaacctcggtgcccatcagtggtggattggataaaggaaatgtgacacatatacaccatagaatattatgcggccgtaaaaaagaatgaaatcatgttctttgcagtaacgtggatgcagttggaggccattattgtcagcaatttaacatggaaacagaaaatcaaatactgcgtgttctcacttgtaagagggagataaacattgcatacacagacataaagatgggaacagtagacactgggagctggaagagggggaagcagggagtggtacaaggattgaaaaactgcctttgaggtcctgtgctcactacctgggtgatgggttcaattgtatcccaacttcaccatcacacaatctatccttgtaactacctgcatatgtaccccttgaatctaaattaaaagttgaaactaaaaatgagtaagaatctgaaaagaggaggagcaacttctcacttcagggaagctttcttatgggagtatgttttatacacacatatacatggtatgtatatatgaatctgttttatgaacatacacctatttccttacggactatgaggacaagaaaatggtgtttccctcgtcaggtgactgggctgctacttggatttatgtttggtaaatatgttagtgtgagataatgtaccatacgcctccagaaaccaattttttaaacaatctatagcaccataaattagcattttctagtgtgactttcaaatattaattactattctctgaaaaaaagtttcatgaagagagttcagttcacagagtccaggtacatgtgagaaactgccaagtaggttccttcctcaaaactctgagaagcactgcaatagaaaaaacatttgattttgcttaaagcaattttccccatatttgacaacaaaaccatgtctatttgctttttttctcttccaaagtcaagctattgacatatttgttctacagaagacatctgagaagatttttattaaaccaaataaatgagtaacatggaaaatttgagcatcatagtgggattagagaaacatttttggcaggggatgggttgtgggcaaccattttattattccatttagcttggtttactcctctatttattgatgtctggtactgtaagtgtataattatttagtgttcagtaaatgctaagccatattaaatggtaatggtaagattaagcatgtgcatgctatttgtccaatctagatacaggctaggctcaaagtatgatgtaacttcagccatgctgagggttctataggctttaatattcttcaaagatgttatcataagacttaatagaactagaaacagaacatgaataaaccaatatgactgtattggagatttttccgattgtcaacaagtgtttcgttgactgttccagacttttaaaagtgctgtaacttcaacatccgaatctcctttttgtgtgcataataaacattcctgctttgtgtaattttaactagaccaaacgatgcttacacttcccagataccagctgttgaagcagcaactttcaaatgattttgcagatcggcaaacacattatatcattgtgtgttttgcagctgtctcttcagttagcctggttttgctttttgcagagtaacttgtgtacagttacagaagagtatttgttttcctccaacagtcttggcaattagtgctttcctagcttcagttttactttggtgcaataggcaccctgtattgtgaaccgtttataaaccaaggtaatgacttgtgggtttttaaagagtgcttactgcaccaaaaaaaaaaaaaaaaaaaaaaaaaaaaaaaaagctttctcctggcttgagtgattttaaaaccgtttagtcaaatgtttgagtgcctattgtgtttaaggcactctgtaagtgttttgcatccactgagcaatacatagtagaagttagttgtatcacacgtagatgggaaggttattctaaggaacaccacttttcaaacgcaagagagcatgtccctgtgatgccacagagggaaactcagtgagactagagcagagtacaaaatcagagtatcttatggtaggcgtgcaagaagtagattgcagaaagctatgctaaagagtttgtaaccgaattgaatttggaatgaatggaaatcctttggaggattcttttttttttcagggttatgcgaagatcagatttgtgttcttggtgaaagatcacacagtatagtagagagaatgaactataggcaatcacattgggtgcagggaaacgagtaagcatactattgcctagttatataacaatagattggcaaaactggatagtagagacagtgagtcctagttagttttcttaaatgaatctattagccgatgtacagatattagatagaggacgatagcattttagagctggaaaatccactaatctaagcccattgtccaagatatgaaaactaagtcttgggccaattgaataatcttgataaaagctttaaagctagatagtatcaaagctagaatcacaatccacatctctaaggatactttgctttacattatttctctttttttttttttcttttttttttttgagatggagtctccctttgtcgcccaggctagagtgcaatggcacgatcttggctcactgcaacctctgcctcctgggtttaagcgattctcctgcctcagcctcccaagtagctgggattacaggcatctgccactgcacccggctaatttatctcgctatttttattttgtattttattaactttatcattgagccttaactgcatagattaaaagagtaacttcttttaatgtaattatacattgctaaaatgaggtctcatagcagaagagaaacgtttaatggcagcttcctttacctcttgctacttgactttgagcaatgcattcctttagactcaaaatctgctttttattatttaccagtctcccttatctgcattattcagtgtgcaagtattgatttccacttatgttccagggactgtagcaggtgttgggtgaataatatgtggaaaactctatccttgaggctgttatggtgttggagaaatggacaaggttgtgggtggctctgcaaccacagtggcaggacgtcctgcccttctggggagttcaaaatggctttctggacatgaaacttgattaagagcagtgccaacatcatcgtttcaaattatctggaagtgtacatttaggagcaaatgtacaaagctataaaaatattcataattcttttttacacctaatacttgacccttgtgcttggctctgacgtgcttactctgaaactcttttgaaattggctttgtgtgtagacaacagatcagttctcagatcagaaagtaagtaaactggcatgatgttggattttggctagctctaactattaagtagtgatgacaagggtactcagctctgaagcatttattttttattttagatgacactatcttaatctcaaaaagatatcctttgacttgaacacctttcctcaggtttaagctgtaatcaagttaaaaaaaagtcaaacattctcagtttcaggaagatattactgctgtctaaaacctactaaaacatattttgcctatccaaaaggcaaaatatgtctctgaagggaacatgagcaccttggcagaaaatgaagctatttataaatcttattttctttactctttcattccttagttgtttttattggtcatatttaagatatggacatttttaatatatgtacactcacaaacatatatatgcacaaacatacatacacatacatgctatgaaataatctatagctaagtgaaacatgagacatctcagcatgtgaaactgtaataatctcattcagttaccttttgctaaagtagactttattcttttgcatttctattatttctttcttattacttttctttgtttattctaactttcttgttgtctgccttgctttaatcattttgtttcttctctttatctcctgagcaggcaaacaaacctctgggcaatgtggtcttgcagctcagaacagcaaagaaaaaaaaatatttaactcgataactgcaaagaagaaactgtgtttcctgggagaggaattattgccaaagtagatgcaagaaaaatcagctctggcagagacaaggaagaattacacatatgtcttaagtttatacttcctagatttctatcacaatgatagtaacaaagatgtgaaacacttcatttctataatatcttaagtaggccaggttcagtggctcacgcctgtaataccaagcactttgaggtggaggattgtttgaggctaggagttcaacactagcctgggcaacatgagtcgtcttctctttttatttttattttttatatatattatactttaaattctagggtacatgtacacaacgtacaggtttgctacgtatgtatacatgtgccatgttggtgtgctgcacccattaactcgtcatttacattaggtatatctcctaatgctatccctccctcctctcccaactccatgacaggccctggtgtgtggtgttccccatcctgtgtccaagtgttctcattgttcagttctcacctatgagtgagaacatgtggtgtttggttttctgtccttgtgatagtttgctgagaatgatggtttccagcttcatccatgtccctacaaaggacatgaactgatcattttttatgggtgcatagtattccatggtgtatatgtgccacattttctttatccagtctatcattgttggacatttgggttggttccaagtctttgctattgtgaatagtgccgcaataaacgtgtgtgcttgtgtctttatagcagcatgatttataatcctttgggtgtatacctagtaatgggatggttgggtcaaatggtatttctagttctagatccttgaggaatcgccacactgtcttccacaatggttgaactagtttaccatcccaccaacagtgtaaaagcattcctatttctccatatcccctccagcacctgttgtttcctgactttttaatgatcaccattctaactggtgtgagatggtatctcattgtggttttgatttgcatttctctgatggccagtgatgatgagcattttttcatgtgtctgttggctgcataaatgtcttcttttgagaagtgtctgttcatatccttcgcccactttttgatggggttgtttttttcttgtaaatttgtgcgtcctcttctctattaaaaaaaacttaattagagattctaatgatacagagaggaagatcaaataagtcaaaacaatactattgagaaatattcaagacatttatgttttaaggtaatttgtttattttgccaaaagcaatacataattatttgatcaatcatataaatctgcttcaatttttgtattatattttaaagtttaatatataacttgaattgtgctactccctgtgaagttttgctaaaatatttaattattattttacaaaatgtattgttttgcaaaatgcaaaatctttttctcagaaagttgagttgcttacttagtttcttttgttggtcttactgatttttttttttttggtcacatattttagactttgtgtggcccagatgataagttatcatttctcataggaaatcatatggcctaaaccaaaataaaacaaaagaataggaagtctgtgagacaaaacatggaagtcatttagcatagataatacctaggaaggcctgaataaattgccattggttacttcttaccagtcctacaagttttactgtttctgcttatgagagtagtcatctaccttccatcatcaatgcaggcatatattggatttaataacatttgctcttttgcctattgaattgtattattgctgacatcaaaactctcctaataatgtttttttttcttttctccttaaaatatcggctctgggaggacacttacccaattttctttcatttaatttggcagtaagatgctaacggtccttttttattgacagaagcaataacaattaatacaacttcagtgcatcattagttgacatgttttgtccatatattgtttcaaatctctttaagaaacaaatgatatccatatttgagttaaatacaatggtagataaactaagttagagatgtgtgcgtgtgtgtgtcagccaatactttgagtgttagaattgttttcctattcattattttttgaataaacaagtaaatgctagttaaagctatttgatgctgtgactgtttagctccttatgcaaaagacaggtcaacacccttggatttgttgagttgactgtgcattcagcattatgcaaagcaatgacccagggtgcatgtcttagctctgaccttaacctgcagttacttctcaatgaagctctgatgcctttgtcaagtacttgtactttatccatagattagctaattttcaagttgtggggttaatctttatctgtgttacctttaaactaaacacttactgttccctaaagcactttagtgctttagagaacatgctggagtgaacctccctgcctgaatctgttatgtcatgacccttcattacagactcttttgaagatgtgaggcagttttatattaagcaaagattatcagagcagcctgctttatgaaaagaatcaacccaatgtacatgacatgcaccagtgtttctctttgccaaagggaacacactagtcactcacattagagatggccttaagttactatagtcaaaatactccactttggtctgtattttctttaattcagtgtaaacttttgtggagcatacatctgaaaagtccatgctggcactcagagagttactcttttagcgtatgagacagagtgatatatgttgcacgatatttttgtgtttagaatggtcatctatggaatgagattacagaaccaattttctttaatttaaaagaaaaaaagtatttaacctacttgaaacacatacaaatatgttaaaataaataaaaatagttatttatgtgtatttgcacacacaaatagataaaatattaccttgacatattttattatagcataacttgcatcagtatatgtgtacatatacatattggggcatatttgttcataaattcttaaagtagcctggttatgcatgctctgtcttaaatgagtttaatatgtcattatttcactttgagaaatgcatagttattcacattggtttatcacatatggagttgaaagagtctattttacttctctttcaggatcatacaaatagttcatttatataatcacaaaatggagatccactccatgattggccctgcccattaatattgaattttcatcacgctgttattctttacgtgagttcttaaatataaccctggtaagggctataacatgtacatttgaaaggattataaactgtgatagtagaaaattctgagagaattataggaaagtcttcactgaggactcactggagatagctggggtgtatatctccccttgccctaggaggatatcttgcatttttactttacatattttgtctcagaatgagtaaaagacataccttagagtaggatgcaacagtgttctcggatagcactaatttagaaaaaaactgggattgtaaatgcaaatgtattagagaaccattttgcaaatctcttgcttgtaagaaattccccatatttttgccccatgtcacccatccatggtgattaatactcatccttaagccttcaggttttgtcttatatcaggtattcatggaacaatgtgtgtttactttatctatctccatcctgactgatcatatactgcttaccttcgctctttttagactaaagtctttttcttttctatttatttgttcctctgacactatttttctatgcaattttgtttgagcctttctagtaggggagaataggtctacattattgtttataatttcttgtgatcattccttgattttgcttttagttgtattactgcagttaatatttatgtttactaatatgcatatgcttaatcccaaatgatactaatatgattcattacagtgtacagtatgtcaagatgactggcaggtatctgattcctaagtactataatgagaagcttaggcctatagtacttagactactgttatttcagtacctactacaatcagtagatttttaggcacatttaagagatttatacactgactgaggttcctaagtcactgtttattttatggaaatagaggcaggatttatggatagaaaaaatcagaaaaatgctttttttaacccataaaattagagtaaaataatttttataaatctttaatatttagactttggttttgtagataaattctgtgtttgagaaacaagcctttcgtgggttggggttgggaagcagtcctggggaggaaacataatatcctggcaaatgcggccagtggcctggagagtgccatgcaaattgagaactgagagcagttgtggatgtggaatgaataggggtttggtctgggtgccaagtcaatgtaaggaatgaaagctacatcccatgaagatagtttagtgacaactctggctttcagcaagttgatgaaaagctttattattctaattctgctgcaattgcaggagtcccttctgtctgggggttaagcttacccaagagtgttacttcatttccaagtctaagcattaggttctgatacatggtatgaaattgttaaactctgtggattttaaatggccttttgaaattatctgtatcaaccgaggtgatgttaagatacactgagatcattttcaattaattgtacttcagccgatgttgagagggagcaggtagggaaatattgatcaatattgccatggggtatacattttatatatgaaataattacttgtgtcactgaacatgtgtttgtctcaaagccgtatgaaattgtcagaatctgtccttttttctgacttctccctttattcaataacactcaatggtcttatatcattcttaatgtgagattgacttttgtctctaaggaatgtaaaagttagcctgattttctgtatcaactcatcacaggcactggcattcccatacctctcttccaactgagttcttgcttgcttgacagaattgtgagccccttgcttcctttgacccccaggtttcccaatccactcgaattgacaatgcctttggctctcatttttttatcctagcacatcttgcctttcctgagcttgctgtcctgttggcagctagactgctgtctttgttgttgataggacacaaattgggaaatacagggacaaaaattttaacctgctccattacccaataggtttggttttttaaatctgtatttttacttcatacaaggtaatttgcgttgtgacatacctatatggtaatgactgtttggtgggtattttcaatgttgattttccagagttgtcttagaacaaaagtgttggcattattctgtaggctggtaaatacgttgtgcttccatttatgtggtttcaaagcataacttatgatatttgtccaaatgaagaaatatctttgtttgtttttatccagcaggaacttataacttatttcaataatgaatttttaaatttatttgaccaatatgattaacatattaagttctgattttaacaccaaaaaagaaaaaataaaataggccatataattttgagcatttgtgaattttatggaaatactttaagttttaaagtttttaaataggccacatgtctagtattaaaaatagttcacatgtctattattatttaagtcaaaaattacagaagtgggcaaagatgtggagaaaagggaacatatacatcattggtgggaatatgtattaatgcaacccctattgaaaacagtatggagaaaaattacagaagtgggcaaagatgtggagaaaagggaacatatacatcattggtgggaatatgtattaatacaacccctattgaaaacagtatgcagattttttcaaataaccaaaaatagaattatcatataatccagcaatcccattactgggtatccacccccacagaactaatatgatccagcaatcctattactgggtatctacccccacagaactaatcatggtatcaaaaacacctccattcatatgtgtattgcattactattcacaatagcaaatatatggaatcgtgctaaatattgatcaaaggatgactggataaagaaaatgtggtgtatatgcataccgtggatactactcagccaaaagagaatgaaattatgtcttctgcagcaccatggagggaactggaggccattatcttaagtgagataactcagaaacagaagtcaaatatcacatgttctcacttatatgtgggcgctaaacaatgtgtacacatggacagaaagagtagagtaacagacactggagactcagaaaggtgggaggatgggaggaaagagggagaaaaaattacctaatgggtgcaacgtacactattcaggtgatggttacactaaaagcccaggcttccccactacacgatgtaacccggtaacaaaactgcgctggcacaccctgaatctataacagtgaaaaaaaatttaattaaaaaagtaggccacatgttgtttcagctgatgtttacatggaaaaatttgaatctcccaaggtctctggagagataatggaacttcaaacatttcagtgactgattttataaacgcatatgtacgtaagtgtgtatgtatatatatgtctaacttagcataatcaaaaactaagtcaaggctgggtgcagtggctcgtgcctgtaatccaagcactttgggaggccgaggcaggtggatcacctgaggccaggagttcgagagaagcctggccaacatggtgaaacctcatctctactaaaaatacaaaaatcagccaggtgtggtggcgggcacctataatcacagctactcaggaggttgaagcaggaaaaatcacttgaactcaggaggcggaagttgccgtgagcccggatcgtgccatggcactccagcctgggcaatggagtgagactctgtctcaaaaaaagaaaaggtcaaaagctaagctatatatatgtatatatacacacccatatatagacaaatatatgtgtatttggacatacatatatacgtgtatatatgtgtatacgtatacacatatatacacgtatatatgtctatgtatatttgtctaacttaacatcaaaagtatacactacaattttaaaagattaattacagcacacacgtcaaatagatatgtgttgtgtgttttagacttatccttttatctgtccgataagtgggtattcatccagaagacctaattcacatattaatttctcatcttctcacagataattgttttcaccagagttttaccaagacacttcataattaggagtaaggaataggttttgaacattttagttttgaatcctacgtctgctaattaccagctgtgtgaacttaggataattatctaatggctttaaatcttaatttcttcatctgtaaaaggattaaataatagctttctaataatactaaatgaccctttttgtgagtgctagaagacatcatacatggtaaacacctaaagagtgctcgccacataaggctcattcaatattaattctgttttcgtggatgatggttattatcaccgttgactcaagagtttggcatttttgttttaatcatttgcttcatggctttacttcctttacagatagcaataattggctatgcatcgatctttcctcagaagctagcacatgtcagaaacatagtagatatttaattaatttagggtgaataaatgaagtatgccacttctttacaaaatgccaccagtgggacttgccagatacacatatgatcttattttacttcaatttcatcatcacctgttctaaagcatctgatctcccgcacatgaaaattaagctttttggaaaatcacaccattgcggttggtactgattgctttgcccaaattattttgtcttccaaaatacactgctgattcacatcttttttttcttttgctcatgtagttattgattacttctgtctagaattgcccttgcctgacttacttgtctgattcacttactttttcaaaactcaactccagtattgccttatctcagaccccagtctaggcttagatgctcccacgtcatgctctgcttcacctacttgtcatatgttatgtgacctttcctgtcattaactgattttgtctcttactcatgagattgtattcttttcaaggatgagcatggtttcagtgtctcaattatgaatgttttgccagagagttcttagttccttactaggattcagtaaacatgtgttaagctgaactgaatattgtatatagactgtacattctcaatacagtttcttgacttatattcaaaaggacaatttttatttttgcaatggcctacataaaatgcttctttaatccccttgtaactttgctgtaaaaattgaactcaagagataagtagttttgaggttttgggaaaggaaagaaacaacgatttgattcttcttgaagggtgatctcttgttacatatttttcctatgattttaatgagtgtattgcaaaaaagttctgccggatccttatattttctagaaaatctttatttccttactcctacttctgtgttggtttccttaaaacatgacatttgaataaaatttatgccttaggaaaaatgtatttcttttaagctgtaaggtttccaacatcgtactgacatagattcaaaggagaggttccatgtcaaattttgtacttcaacaagatcctgttccattccagttcattgcatcaggctatagctttcatttaaaattttttctttgagaatgctgtgagtgaaatgtgtggctctctttccataccaggaaaatcctctatagagtagtgtatactggaaagacttataataagatatactactgatttcccatgtctaacatttggttctctgatgtttatgggctctactaatcagccttgtggtaattggttttctgaccataatttgaacagaaaatattactgaattaattgtttttaattgaaggaaagtcaatgtagtttttataatacatttttactaagagggaccaatatcatatgttcccattggaattagactcaattaacctattagtgttagatgcataaatacccatcctcatacccatcacactgagtacttattacaccctacaacttttgtttagagatagcatgcattatcttatttatcaaagtatctgaagtaactatggttatccttattttataaataataaacagaggcacagaaagttcagagttacatttgaatgaaataacatgttaaaaaagtgaaaataggttttaatttttcatcccaagatggtaaacacatgctcataacataggtctgcattgacctctctatacctggaggctgaggttgagcaatttatatttctagaccaaaattctcgaaaatgaacaaaattatattgcatttatttccctgctattcattacataataggaacacacttaatttttgtacatgaatcatgagcatggttcaagatttccagctctgactctaaatacttttccataatcatcctacttctgttccgtaagtgtatacacacacacaaacacacatatacaaatacatatgtatacacctccactcttactactgttctttctttgtccgtggtgctgaaagcaggaagctgttccataaagaataatgacagaaattataacaataaaaggtgctgtacttatcaaccatcaaaatgatgttaatcatatattgtgcataacatagagatatttgtatttcttggtatattaccctaaattctcaatataaagatcaaaagaacttaataattaggagaataaaataatgttaaatattgttagtcacactttgagaaaccaaaggttaaaagactagccaacatctcacagagagctttgaattgattgcagctgactgcaaatatgctgactaattatcatgccctttaatagtactatcttgcctggcttttatgttagcctagggaaaattgtcatggaaaaatgtgaatggctaaatattttattcaaatttatcacctgtcatcaacaactagaaatgtatgagccagttattcacccaactacatgctgtggtaggatgatggcagtgattataacaaaaactactaccatttactgaacacttactgtgatctttataagggtcagctaacttaatctttacttcaacctcataaaaaataaaattcttattttggagttacagaaccttttacatggggagatttagttgcctgttttccttggtattggagcagagttactgttccaaaccagattatctacaccaaagtctatgctcttaatcattattctgtatcacctgcttcattttatacactcattgttggtagctatcaaaattgtaggtattgtattgccatgactgaagtctgtctttatgagtcagtgtgaaacagtgatacaaaaaatagtatatttccaattagttacctcgtgtagatcttccgtgtgaccttacgaaagataccttgagtttaatactatcctaagaaaaataaattcagggtcagcatggtgtctcacacctgtaatcccagtggtttgggaggctgaggtgggaggattacttgaggccaggagtttgagaccagcctgggcaacagagtgagacccccatctctataaaaataaaaatttaaaaaaggaaaataaattcagaaaaaattgtaccacaaagtcatttgtttgcagacaattatgtattgtgtagatataaccagtctttgacagacatgtcacttacactttggaaattattagacttgcctaaacttgtagttcatttagttgatattgctgaaaacaaaacaaatcactactgtgcctttgatgattcttgagaagttcaaaagggaaatacaacaataatttgctactgctgtgccatgcactgcactacatagctcacagaatttacttttaattatcatataccttttgctctctatttcatatgtatacatatatattcatatatcatatttatttttatattcatatataatatttatatgtaactaaaatattatatagttaatcagtggcgaagccaaaatggtaatcagtgtattttgattataaaacattaaaaatattaactatatcagaagttacaaagtgttcaattcagtacaaatgcaatatttgttgcatttatatttccactttttttttgcccagagtgtgtgttttgtagatgttgcagttgttagagtttgtccatagtatttttgaattaaagtacgtcacaaagaaattaagatttttttctcttgaaatattagccatctggctgtgttaggctcatattcatgcatagatgtattgactaaatctaggtgtactttaaatgagaatgttctctttagggtagtgtagtccccacctggctcacttcactcatttgtgttagcatatgttccctgtaggaattcaggtttgttgcttttgcgttatactcaaatgcactaaagcagggttcagcaaaccatggctcatgcggaacagcctatttttgaatataagttaaggatggtttctgcaccattacaaggtaagagaaaagagagttaataataaaaggggatgtgacagtaactatacatggtccgcaaagcctaaaatatttactatctggccctatatagatggctgacctcttctttagagtattttatgggacttgtttattctacactgcctctgactctttgaaaaagattggtagcattattcaatacaatcatggacactagaagagattttttcatggcaattagcctggccatcttgggcaaaattagagcctttgaggctttcatgtttgtttctgttttttttttttttttttttttttttctatgagctaagagaaaaccatggtctataagatatttctggaagcaaaactaataaccccacatggacagctgatttctgtgttacttctgcttttaaagccagattgggcatcaaaggattgcctgaactgttcatttggagctatttgtttgaagctgattagtgaaaatgctaagtgtgagtaagcaatgttacttaaactctaggatttggagagttttttcaccagaggaatctgatttagctgattggaagggtacactgatagatttcttgttagtaggaatttaggaacacaggggagagcaggtttagcaacacaggcatgctgattatgaagcgtggtaccacttacgggggaagaactctaatatctttagagtaaatgagtaaagagggcctggagatgaatttgataatgtatacctcacccaaaggtactaaaatagggagaaacatagcaagtagcattgtgctcacccaaccagaggcatctctagctcaatcagttcagccatgacttctcattggtaatttgatttgaatcataattgatatgatttggccatgtccccacccacatttcatcttgaattctcacatgttgggaggtaattgaatcatggggcaggtcttctcatgctgctttcctgataatacataagtctcatgagatccattggttttaaaaagaggagtttccctgcacaagccctcttctcttgtctgctgccatgtgagacatgaccttcaccttctaccatgattgtgaggcttccccagccacatgaaagtgtaagtccaacaaacctctttcttttgcaaattgcccagtctgggatatatccttatcagcagcatgaaaatggacaaatacagtaatctttgactattagagtagaagacattcaaaagcattttagtgcatcttcatctcatgaacagcattaaaaaaaagcaaataaaatggtcataaaatttaattaatttgcccaaatttgtcctaaagagtcagcattagtatctagatatcctattgcaaatttggggctctttttattacattgtctataattccactgacttttttttctaaagagcattattaaaaaaatcagttgccgattgcttttgagtagcataccgaaagaacaaaggtcttaggattggataatcaatgtaatgaatatttataagactatttgtaaatggattttgactaatacaaatagatctggtagcaatattgtttcataacatatatctgtgaatggtgttttagtatcttaggggttggggcttccttgctgaggactcagctaagtaagaaagccagtgcattatttttggactcagaatagaccaatgtgaaggtattaacaagagtaaagacggcaataagagggttgagctattttagcttttccctcaagtaagttttaacttttgcttaaaaacattaattttaaggatgtctattttgtttttgaggccactgtgccaccaggttatttattaaaacaattaatgattaatttactatttttctgccaatgaaagagctaggattcataggtttaattatggctgtgtcagttgctctttatggaggctttggcaagtaatttaaattctgaatctaacaaatttcctaagaatggattaactagtagttctaggtacatactgtaaagtatatataggaaactaaaatttagataagacatatttggtttggcgagctgtaaggagttaatagttttaataaactgtgttcaggataatgtgagtgtaagatatgttcagctgaaagtaaagaaaatgattaaacaaaaatatgaaataaacaacaacaaaaaggaacgagtaaacgaaaatgcagtccagcagcaacaatatgctagaaagttggaggaaaccctgaaaaatggaaagctgttgggaccagactaatgggaaaaagtactgaaggggaaagttggaatcttttcgaagaaaatgattaatagcatgcacaaagatgtcctggaatgtttatcacatcagtacgagtcatagaatttggaagcaaactttcctttcaccaacacgtcttgttttaataaatcatgatatatcaatactttggaacattatgtagccattaaaatgatgttactcaattatatctattcatatcaaagctgcaaaatcacacttaaattattcaataaaaatttatttagccccttctaggcattggacactattatgtgtactagaggttcaatgataaactcaaagtagtcctgctttgagtttattgtctattaaatagaaaacagtcatcaggtacatatgcagattagtgagtgtaaagttacaactgtgaaaacattcttaaaagcctcatcttaaggaagtgtgcaaagtggggtctggatctaattggggatttgaatgggctttcctgaaatctgaaggatgaaagaattgagttaactatgtgaaagttagggggtaaaaatttaagggaggggagaaaaaaggtcatatgaccatatggatttttgctccttagaaattgaaataagatttctgtggctggaggttagaaagtaatctgtgaatgtaggataaagttgaatcagaaaaaggaatattaaaaatttgctaggtgagtttctctaagtttcctcatataagcgagatattattcacagaagcagtgagtagaatggtggatacctggagctggagggaaggtggggaggttggggagatgatcgtcaaaggacataaaatttcagttagaggaataaagtcaagagattaattgtacaacatggtgattgtagttaataacaatgtattatatatttgaaaatcactaacagtaatttttaagtgttctcatcacatacacacaataatcatgtgagataatataattgtaatttgttaaatttagcgttatacaaggtatatttattttttaaaatcatgttatataccataaatatatccaattcttgtctttttaaaaaataaaattgctgggtgacaaatattgaatgcttaccgcatgttgaacattaagaatgatcacactaagaactctcaatagcttttgagacaggtatgagtatcatttgcatttctccagataagtacactaggatgaaactaaacccatgtcacacagtactgccagagctagggtttgaatccagactgaatagcaatcactgtgctacactcatcttttgggtaggagatagtccataggtctattttaaatgttctggattttgatttttatcctaaaataagataacaagcattggcaagttgccatttttttgataaattcttaaggcatttgtggggaggaatattcaagtggagagaaagagaaagtaaaggaggccagcgagaaagctattaaataatgcagaggagaggtcatgatagctcgctccaagagggaagattagagatggagggaagaagacaggttgcagagacgcagaacaggtgaaattgcatggtactccataatggacctgctggggtgcaacgtgagaggccgatctcaggtctgtgtggaggatgacaacctgccttgagataggcagcactgaacaaagggcccgatgactatgagtgtgttctttttttttcttattgagtgcttcgaaacacttatatattgaagtcaaaccgcatgaatgtgtgtgtgtgtgtgtgcgtgtgtgtgtgtgtgtgtatgcatgtatatctggaactcagggaagtttactgagctggggatagatttgccaatcatctatgggtagttaggaattagaactatgggtatcaatgaagtttcctagggacatacatgaatgaatagagatgaacataataaatcaagtattaatagtaattatttctctgttataattataggtattctttgtgctagttttctttatttgtatttttgttttactttaatcagcatatattgatttttgtgggaaaaaaattgaaaaagattttttttttcaattgagaagaaaaagtttattgtatatggcaaagggtagaggagaagagaaccaagatggacccggggttttgtgtctggatcaaaaggcttttctcctctcattttgcactgtttaccccactcagtttggcgctaccttttattactcactagcagtatcatttccatcaaaactctaatttttaaatattttttggacagtaatgttagctgttatcagaagttgtcaacagaacttaaattcaattttacttatactttaacatacaggctgcacatgctaaatgcttgtcacttagaatgctgttctcattagtctggattgcagattttgttgtcatgatgatatgtctggcaacattctcatagtgggtgagctcgactgtctagggattatcttctattacagttcagtttatcatgctctgtttgatatgttctttattaagaaacttaattacctatagttctagatattatgtgctaatgagttgtacgtgtgagtaaatgtattccgaactcatttttggctgctgatatatttctacaaagatgctttgagaaaaagaagcgataagatctgcttccattcttggtcagaaaagttgccacttagtcataatgtggctttattccatgtttccatgaaattcatttgagacatagtaaactcatatttttgaatttaatatttgtaagcacactgtcagttatccacatagtcaagtaaaacttagccgtgaacaaaatctttgaactgtaatgtcatattgtgtcaggtaatcttattcagctatgaaatacttaatactttaaaaatgacactttattgagcacttctatgtataacagtgtttagtaaaatgtttattttgactacttactatagttacatcaatttggtatttccagcagtagtcagaggaagcacaatttaattaaatatgtggatggagaaaattgatttcagagcaaagtttcttgtttcagattacttgtttggatctcagattttgcgtgttgttaagggacttacatttgtataaccaattgtaataaatgaagatttccatgaggcatatggttgcattcatttcggaagaactacagatttcaagtaaaacaaaacaaaacacagaaatcactgaaccaaggcacatttattgagtacagacatcaaacaaatctcatttttgtattaaaatctaaaaattccatataaatagctatgtttgtaggttgttctcttaggctaaaaataaagacagatattgcatctttcatcaacctaacatcaagatatttgcgtgggaccaatcttctcaagatttgattttaaattgttgcttagtcttattcaaattgcatgtatccttccctctcaaggtacataaaatgaaatgttctgaaaagacaattatgtgaatatgggagattctagggacttacagactctactaattttagcaataatttttttctcatagtgaggtccattttcagagtacattaaatcatgtataaatagtcttcatctttcagtaaagaaactgattcttccagttgaaatttaaactttcttttactctctttttcttttttctgttgtcaacttcattgaaatgtaatttgcatacagtgaagttcatccttcttagtgaacagttctgagttttggcagctatatatatctgctgccactattaggatacagaatagttagcccaaactccctcttgccccactttagtcacctttccttgactctcactctttggtaggcgccaatatgttttttgttcagatagttttgctttagcagattgttatataaataaaatcagacaatatgtagcctttcaggattggtttccaaagttcatctaatgcatttgagattcgtgcatgctgtggtgtgtgtatcagtctctgttttcttttaatgcagaatagtatcccattatatggatatgccatagtttgttcagccattttatgctttctttttattctcttttttcaaaattaattatttatttatattaattttgtgggtacataatagttgtatatatttatgagatacatccgatttcttttttttcctttttttttttttggagacagggtggtagtctgtcacccaggctagagtgcagtagtgtgatcgtggctctctgcagcctggaccaccctggactcaaccaattctcctgctacggcctcctgagtggttgggactacaggtgtgcactattatgccttgctgatttttttgtgtatttatacatatattttttgttgttgttgttgacatggggttttgcaaaattgacagactggtgttaaactactgggctcaagtggtctgtgtgtcttggcctaccaaagtactgggactacaggtgtgagccactgcacccggccctatacatggggtacaggagatgcttgatacaggaatacaatgcataccagtcatatcagggtaaatggggtgtccagcaccttaagcatttaccctttctttgtgttacagactataaaattatactcttttagttattttaaaatatagaatagattattgttactgtagttaccctgttttgctatcaaatatagatcttattcaccctatctaactatatttttgtacccactaacaaaacccgcttcaatcccccctccagccactaccacactaccattcccagcctctggtaaccatcattctactctctatctctgtaagctcaatttttttttaaaaaatttagtttccacaaataagtaagaacatgtgaagtttgtctttctgcaccacacttattccacttaacataatgacctcctgttccatccatgttgttgcaaatgacaggatctcatacttttatatggctggatagtattccattgtgtataagtacaacaatttcttcatccactcatctgttgatggacacttaggttgcttccaaattttggctattttgaatagggctgcaataaacatagaagtgcaggtatccctgtgatacactgatttcctttcttttgggtgtatacttggtggtggggttgctggatcttataatagctctatttttagtcttttaaggaacctccaactgtttgccatagtgcttgtactaatttacattcccaccaacagtgtacaagggtccccttttctaaatatccttgccagcacttattactgcctgtcttttgaataaaagccattttaactgggatgtgatgatatctcattgtagctttgatttgcatatctctgatgatcagtgatgttgagcatctattcatacacctgtttgccatttgtagtcttcttttaagaggtgtctattagatcttcgcccatttttaattgcattattagactttttccctatatagttgtttgagctccttatgtaatctggttattaatctcttatcagatggatagtctgaaaatctgttcccccattctgtaggttgtctcttcactttgttgattgtttcctttgctgtgcagaagctttttaacttgatatgattccatttgtccatctttgctttcgttgcgcatgcttgttgattattactcaagaaatctttgccaactacaatgtcctgattcctcagtggtttttgtttcttgtttttgtacagtagtttcatagtttgaggtcttagattttagtcttttatccatgtttatttgatttttatatacagatctagtcttattctgcatgtggatatccagtttctccatcatcatttattgaagagattgttcttaggacctttgtcgaaaatgaattcactgtatatgtataaatttgtttctgagttctcctattctattctattctattctattctattctattctattctattctattctattctattctattggtctatgtttctttttatgccagtagcatgttgtttgttcactatagctctgaagtataatttgaagtctggtaatgtaatttctccattttttcttttcttttctttcttttttttttttggcttaggatagctttggctattctgggtcttttgtgattccacgtaaattttaggattgtatttcctatttctgtgaagaatggcattcgtattttgataggaattgcactgaatctccagattcctttgagtagtgtggacattttaacaatattgattcttcgagcccatgaacacggaatatctttgtatttttcttgggtctccttcagtttcttttatcaatgttttacagtttttattgtagaaattgtttgttctttttgttgttgttgttacttcctagctattttattttatttccggctattgtaaatgggattactttcttgatttctttttcagattgtttattctgggcatatagaaatggctattttaatgttgattttatgtcttgcagctttactgaatttgtttattagtttgaatagtccttggtggagtctttaggtttttccaaatataagattatgtcatctgcaaagatgatttgacttttttctttccaagttgaatgcccttcagttctttctcttgtctgattgatttagctaggacttcctactttattttcattttgtaggtagtatttctgccatgaacactaggattatattaacattttaactagttgctgttgtatctacttttattttattttagaacttttccaatgagttgttatgattgtagactttctaattgaagagctttttatttattaaattatttgtaaacatttcaattgtaataggtattgcatttaatgaaaaatgaattgctttagaaaatattctattaaaattctagagatatgttaatgatttatttgttgtattttttggtatgctttttccggtaaaaaaattaattatgaaaaattggaaacaacagacacgtataaggaagaaaaatccatagtattctaacatggctcatagtttgctggaaagtaattacaaattttttcagtctctaatatctgcaatatcaatctcaaagattgagaacttctggcacaccatagttggaaattttaaaagtaaagccaaaattagctaatttagttaagtgagttaggggaagcaaggtgaacctatggagtacagataagaaaacacacttcagtgttcaagacatcaaaaagaaaaaaaagaggaaagaaaaatatatttcattatttgaactagattacattcttccctggagttccctacttttgttatcctgcataactgtgttttaagtagggttaaaactaagatatttcaaattctgtagtagaaaaaaaatagtctggtattatagattaaaaaaatgaattaaatataattattaatctaagttatgaagcctaaaaaattctaactcatttgtttaaaacacgaatgtccatattcttttactttattccatgatatatgaaagtataatagcatgcattctatttataaacatctatgtttatcttaaggtacatatgctaatgaacatttacaaattgcatcccttacattttgctatgaagaatttaaagcacatactttacagtttgattcatattaatacttaaggtctttttcatacaagttgtacctacattaaaaattagaaggggtcttagaagtcatcttagtccaagtaccttatttttctggagaagaaattcatctcttaaatggttagtgaatagaaaagtttaaatagatacaaggatccctagtttcaatacaaaataatttcgcctataacatcactgggatgcaatgaatctcaccaaaaataattttctatatgtctgtttgtaacaagcgttagcccccaagtattttaatcaagaagtagcgatatatgaaagaaatccagtcttgtggttcactcttttctgtgactctcaccatttccctccctctatgctcccaccacagtatttgggatcagctccaccttatctcttgtcaggccagtacttctcacaccttagaggatatgagagtcatctggagaatcagtaatgagcacaaattagaatagggcctgggcctgtggatttgcaccaacttttgtgggtgagttttatgccccctaaagaaatcactggtgtagactcctgcatgtgcttccacataagccccttcctctccagcctttctcattcgtctcgaatcaagaggacgtactttggctggcacaagccttctaactgcctagtccattgtattgttccaaacaagttaatggcatgcactgaactgagacacactttccaccttggcatcggaaggctcccctgtaacattctagcctgggtctctactccagcatgactgaactccggccctttaagaggaagcattaaaagtgtgatttctgttctcagaaacttgagttaagcttatagttactactaagagaaatgttctgagcttcaccatttttctggaaaaaaaaaaggtttttaggtgctttgaatatgatacataaaagctgggtatgggggagaaggcacttagcaaacttggggatgataatatgataggctggtcacctttctgtttaattattttgcttacaatgtttcactgaccataggttttgaacttatacatgcttcaatcttcagttttgatttcactacttccttgtgccttctgatttcccttgctgtgtgctttcttactcttctgaacatgtatagagttgtcatatagccactggaaaaaaaattctgccatatatgagtgctcgtatgcattctgcattatcctcacacaaggcaagggagctgatttcatttccttttgtaatcactgcacatgacaagttcccaaaatacatattgaatgaagtcaatgaatacacttattttgaactcttaatctttataaacattaatattttctggtaatcataataacagctgctgtttattcagtagttaacatgtgccagccttggtgctaagtgttctgtgtatgttattattatgttcttagaacaactaccccgagatgcaagtattttaattccatttcatgtatggggcagtttgaagctcagtaaaaaaataccttaatcacttgcaatagctaataaggactagagttgagaactaaatataaactcctagcaactttatcgatagtgtctatcgtcatcttaatcttgactgtagattgactgtttttaaatggacttaaagtgacagcaaattagtgaccaccatgtcatattttaaaggcttacaatgaagtaatttattctgttatataaaatagaatgatctttcatctaaattagagaagttttgcaattgtgtaggtatattgagtgtgtgtgtgtgtgtgtgtgtgtgtttattacatgcagttcaagggaggctaggtatatgataatatcttatccaagaactgttcccactgtgcttcccgaaagaaaaccgtctgatttcatgtcatttcaggcactttgggttattttaaaagtcttatctagttttttaagacatggttctagaatgcagtctaagaatgcagtcccgtgtgtgattataagacctctttctcccttccagtctttccctggttcagaaaagacttgactccataggcatcatttggagctggagaagacctgttcttttcccatcgccttcatgtgctccttgctttccccctggtggttctactttatagaggacattcaaatgggagttcactctgggatccattggatagtttttcttagggactctgggtctcccctagagtttcctggaatgagcacttagtctctgcaaagaaaaattgacagcagagtctgccacaataaaaatttctactcaagtttgtagccctcttgtgggcgtggacaggatgatactccatagaatttccacagcatccttttcactcatggaaaactcactcacctttgccacaccaaatgtgggatgcaggcttttccccatcttccacacacataccccatttctgctcacctgtctctcccttagcccttcttctgcccagtagtatcaggtggatttaaagcttagaaagttctagaactaagagataaatcagccttcaaaacagtaggaagttaaatggaggtagtgggggaaatgcttttcaaggtacctttatcttgaagaaagggacattttaataagcaatagaataatgatgaagaagtggttgtattccctcaaattcacttattcccaagttttatagatctgtgtttattatattttttctgcagcccacacttagaaataatttttgcattacaatcaagttggctctctctccctctctctccttttctcacacatcagatacctgaaataataatagtaaactcagcattcacctattttatataccctgcactatgtttccttttcttcttctatccagtactatcagtgtttaacttgcttgtttcgtgacccacaaaactgattagataaccttaacctttgcatgcgtcacgtttcacaatttataaagcactgctgtagaaggtaaagactaataaacgtgttggttgacctttcttcccttgtacaaaggattctcaggtcaatagctagattttactaaactggccctgaaaattttataattttgattctcaatagcagttttctgtactctagtctgtgagttactggggaacatttgaaggcaagaagaatagcagttaatacggcgtgccaccttctcaccatgcacactggattcgcaggtagctgtgtatgcatgcacttacatttcctaaaccagttttattgtttttcctgaacatacatgcttgttgtttaaaaaaaactgttctgaaatatataattctttctcattcctgcagagtaatcactaattcaggtcttttttaagtcctacttaatacatataagcacccacgcatgcttatactttagtagtctttttgtttctatcacggtcttgtttattctaaaagttgatcattggagagaaggtgaccttgacatgaaagtcggctcttgcttcaaagtctaaactgggacctccttgctgccttgaagggtaaatttatgatctctctgggataagaacatgatctttagactctattaacttttatccaacttctttctcatttaacatgaaaatgcttaggtttttgtttttaaccttgttttttagctttcattgtgcacttgctgatttcgttctcagtgtgacctcttaaatatccaaagggaaaggaaaattgctttagaaaacctctgtgcaaggaagttcagagaattggacttacctttgtaagaataatatgagctggatatagtttactgggacacaaaaatctgcatataccaagggagtgggacaatagacgtaatgatgtgaatggtaaaaataataaagaggactttgcctcatttattgattttttcaagtattttccatctgagttactgagtacagatctcttcctttcaatttacaaaaactaaaagaactaaagataggcaattatttgtggtacagatgcatttacaacaatataattctgttttaaaatcaagttgccttactcatttcaaagctaaggttgtgatggcatttctggaaattctccaatttatcttaaagttgacagtttttttttgtttgtttttttggtgggggtggtgggtgtggagaccgagtctcactctgttgaccaggctggagtgcagtggtgcaatcccagctcactgcaacctccacctccctgattcaagcgattgtcctgcctctgcctcctgaatagttggggttacaggtgcatgccaacacacccagctaattttgtatatttagcagagatgggatttcaccatgttagccaggctgatctcgaactcctggcctctggtgatccacccaccttggcctccgaaagtgctgggaatacagacatgagccactgcgcagccaagctgacgtttcttacagctattgcctcaaataagtacacgatggaggatgtccttatggcttaagtctgcctcatagacgattgttcagtgaaacacttaaattactccctaagtctcaactctaattccttaggtcataactaaaaaatttacttttggctaaggagtgcaagaaacagacaagcaaccaaaacaaaacctatacatactccccctccaaacacacaccaagattctctttaatattcattatgataattgtaaccatataaggagttctttttgcgtgtctgacagtatgctatacattgtcactaaacccccaaagaaaacttagaggtattattactaagttacagataaaatttttttaaaaagatttaagttgttctaacgtcacgttggtgaagattttaacccatctttcagaatataccatggacatagttgtcaggcaagcaagttagtgtagagatgcctttcattgtttaatggtaggtgctcttttagatgtctggtaggaacccaatagttatcttgtttattaataataacaggatcaagaggggaagtcattttctttggttctcttatttccaagcaacatttctgcattagtaatgaactccttaaacaaacactgaggattcttattagctttctttttctatggcaaacattattaactgatcacggcatctttacactggaagggctgggcagcagaagcttccacagaaggctctctggccagacaccaccaatcaattattgaaggtatcaaaattaaaaccaatgtgccatttctgcctttttctatcctatgactctcttacactgaggattagaaagacaattttgaatttttcacttaagtcttaagagacatgttgatttgcaagaggtatttatgaggtgttatgcagagtaagctagttaactctttgatatcctctctcatggagactaagtaagttggctttccctgttaaggaaaatagtgttaacatctgcatttcacagtgagttaagaattttcgggaatggggcattacatttacggcctaggttctgaaattgtacatgaacaatttgagctcaaagattacaatgttgaaaatcagtgattttctaacagctccttaatgtatagcagcagcaacagccatcacaataataatataacttttccaggttcctactatgaagctaagctctatacagacaaagcttattttattgtactttgtgttattgtgctttgcagacaatgcattttttttttcaaatgaaaaatttttggcatcatttttgcagcagtatatgcctaattcatgtgtttgggtcacattttgggaaatctcagaatatttcaaattaattcattattattgtatctgttattgtgatctgtgatcagtgatctttgatgttactctcataattcttttggagtgccatgaaccatgtcagtataaaacagcaaagttaatcaataaatgttgtgtgtgttctggctgctccaccgactagctgttgccccatctatctccttttccgcaggcctccatactccctgatacacagcaactttgaaattatggcaattaataatcctatagtcacctctaagtactcaagttaaaggaagagtcacacatctctcaatataaatcaaaagcaagaaaagattaagcttaatgaggaaggcatgtcaatagccaagacaggccaaaagctaggcctcttggttcagttatccaagttgtgaatgcaaaggaaaacttcttgaaagaaattaaaagtgctactccagtgaatgcacaaatgataaagcaaaacagccttattgctgatatgaagaaagttttaatggtctgtatagatcagagcagccacaacattcccttgagccaaagcctaattccagagcaaggccgtaactcccttcagttctataaaggctgagagagatgaggaaattgcaaaggaaaactttgaagttagcagagtttggttcatgaggtttaaggaaagacactgtctccataacatcaaagtgcaagctgaagcagcaagtgctgttatagaaatcacagcaaaccggttatccagaagatgtatctgagatcattgctgaagttggccacactagacaacaaattttcagtgtagccaaaacagccttctattggaagaagatggcgtctaggaattttagagccagagagaagctgatgcctctcttcaaagcttcaaaggacaggctgactcttttgttagaggctgatggagctgacagctttaaaatgaagccagtgctcatgtatctttctgaaaaccctaaggaccttaagagttaggctgactgtgctctacaaatggaacaacaaaccctggatgatagtacctctgcttgcagcacagtttactcaatatttttaagcccacgattgaaacctactgcttaaagaaacaacattttctgtcaaaatatacctgctcattaacaatgcacctggttacccaagagctctgatggagaggtgcaaggagaataatgttttcaggcctgccagcacaacattcattgtacagcccttgagttaaggataattttgtatttcaaatcttattttttcaaaagttgattccaaccctcatgaatgactttgagtggctcgagactttagtgaaggaattagctgcagaggtggtggaaataaaaagataactaaaattagaagtggagtctccagaagttcctgaattgctgtactctcatgataaaacctaagtggataaggatttacttcttatggatgagcaaagatggaatttactcccagtaaatacgatgtgaacattgttgaaatgacagcaaaggatttagaatattatataaagttggttgataaagcagtggtagattgtattagtcagtctagagggacagaactaataggagatatatatgtatatataaaagggagtttattaagtagcattaactcacacgatcacaaggtcccatcataggccatctgcaagctgaggagcaaggaagccagtccaagtcccaaagctgaagaacttggagtccgattttcaagggaaggaagcatccaacacaggagaaagatgtaggctgggaggctaagccaatctagcctttttatgtttttctgcctgctttatgttctggcagcactggcagctgattagatggtgccccccccagattaagggtgggtctacctttcccagcccactgactcaactgttaatctcctttgacaacaccctcacagacatatccaggatcaatagcttgcatccttcaatcaaattaagtcgacactcaatattaaccatcccatggaatttgaaagggtagactctaatcttgaaagaagttcaactgtgggaaaaatgctatcaaacagcatcacatgccacagataaatactttgcaaaggaaaagtcaatcaatgtggcaaaatccatcgtcttaatttttgaaattttcatagccaccccaacattcagcaaccaacaccctgatcagtcagcagctagtaatagcaaggcaagttcctccaccagcaaaacatttagactcactaaaggctcagatgattgttagcattttttggcaataaagtgttttctaattaggatatgtccactttttttagatgtaatgctgttgcacactagtagaccacagtataatataaacataacttttttttattatactttaagttctgggatacatgtgcagaacgtgcaggtttgttgcataggtatacacatgccatggtggtttgccacacccatcaacccatcatatacattaggtatttctcctaatgctatccctctcctagccccccaccctccgacaggccccagtatgtgatgttcccctccttgtgtccatgcgttctcattgttcaactcccactaatgagtgagaacatgcagtgtttgattttctgttcccgtgttagtttgctgagaatcatggtttccagcttcatctgtgtccctgcaaaggacatgaactcatccttttttatggttgcatagtattccatggtgaatatgtgccacagtttctttatccagtctatcattgatggacattagagttggttccaagtctttgctgttgtgaatagagctgcaataaacatacgtgtgcatgtgtctttatagtaggatgatttataatcctttggatatacacccagtaatgggattgctgagtcaaatgatatttctggttgtagatccttgaggaatcaccacagtgtcttccacagttgttgaactaatttgcactcccaccaacagtgtaaaagtgttcctgtttctccacatcctctccagcatctgttatttcctgactttttaatgatcaccattctaactggtatgagatggtatctcattgtggttttgatttgcatttctctaacgaccagtgatgatgagctttttttcatatgtttgttgaccgcataaatgtcttcttttgagaagtatctgttcatatcctttgaccactttttgatggggttgtttgtttttttcttgtaaatttgtttaagttctttgtagattctggatattagcctttagtctgatgattctggatattagctctttgtctgatggagagattgcaaaaattttttccaattctgtaggttatctgttcactctgctcatagtttcttttgctgtgcagaagctctttagcgtcagcatgacttttaaacgcactaagaaaccaaaaatgtatgtgacttgcatcatcacgatatttgctttattggggtgatatggagtcgaacccacaatgtcttcaaagtatgcccatactaagtacccactccttatacactcaattttcacaacaatcttgtaagataattttattctttataagtcaaaacaaaatatttacagttcaggcttcagtaacttgcttatcagcaacacagctacacttctcaactgaataccaaggctgccttttcctctaaagttgtaatgtgacatagtactaaatgataccagagacttttcatggcaaacctataaaaaaagtagtgttggtcgggcgcagtggctcacgcctgtaatcccagcactttgggagtccaaggcaggcagatcacgaggtcaggagttcgagaccagtctgaccaacatggtaaaaccccgccactactaaaaatacaaaaattagctgggcgtggtggcaggcacctgtaattccagctactcaggaggctgagacaggagaattgcttgaacccgggaggcggaggttccagtgagctgagatcgtgctactgcattccagcctgggcgacagagcgagactctatctcaaaataaataaataaataaataaataagtagtgtttctaatatctctcaggctgtctttaaaactgcatgtttaaacagtttgctagactaatatgttcagtatccttggtagttgtaagtttcttgtatcttctttctttactctttctctgcaaaagcataatccatctcattgctgatattctcagattctaatctggtacaggttaacaatataaagcagtatgcacttattcacaaaataatatatatttgtagattttgtgattcacaataaatcagtaatagcatattgctctctctctcccctactggccttggtgatagttgttctgggaattctataaaccatggcatcatcatgagagagacacacaggctttctttctgatgttaatcaaaccatttctatttcttcatagcttttcattagatggattttggctttatgtaatacagaaacacatcttacttttaaattgaactgtatgattttaatttattcttcatctttgctaattgttttactttggtcaaatctgaaaatccttctatacctcagaaatgtatctggaaaaatggggataaacataaatcacagggttatcataaagattttaatatactagtgaggaattcctttgaaattgagtatgcattgactgctattgttattactagaacgacttggaagtggacatgaatcatttttaaatagttgtttggtggtacagtttttttaaaaaaaatttctataggtttttgggggcaggtagtatttggttgcatgagtaagttctttagtggtgattggtgagattttggtgcacccatgacccaagcagtatacactgtacccaatttgtagcgttttatccctcatgctcttcccaccctttccccctgagtcctcaaagtccattgtatcattcttatgtctttgcatcctcatagttgagttctcgcttatgagtgagaacatacaatgtttggtttctcatccctgaattacttcacttggagtgataatctccaatcccatccaggttgctgtgaatgccattaattcatttttttttcttttatggctgagtagtatcccatcatgtatatatcccacagtttttttatccactcatcgattgatgggcatttgggctcgttccatatttctgcaattgcaaattgtgctgctataagcatgcgtgtgcaagtatcttttttgtataatggcttcttttcctctgggtagatacccaacagtgtgattgctggatcaaatggtaattctacttttagttctttaagggctctccacactgttttccatagtggttgtgctagtttacattactaccagcagtgtagaggtgttcccatttcaccacatccatgccaacatctatttttttttttttttttggttatggccattattgccagagtaaggtggtattgcatttttggttttgattggcgtttccctggtcattagtgagattgagcattttttcacatttgaaaacatagcttagctcccacttataactgggggccatttctatattttcttttaatttttaaatagtttaaaaacataagcaaagctatatagtctcatattttaacaactagcttgaaagtatttaatggaaaaatttatattagtattgcttatgtaaacctttattggtagttggtgatacttctatcactcatgttaaattctcttctcaaataaattatagtgttttataacacacacatacacacacgtgtgcacctaacatttgttgtgatttgctaagtactaggcatataatttgcctcccaatttattacaagtaaggtttatcaaatattttaccactgcataacatggaatatcaccttgccagcctccaatagtatttccttgacaccagctgcctgactgctaaggcgttgacaactatttttgttttaattgtagcaggatcccactcttggtacttgtttaggtattagggtgatttcgatgggcccattaaccctactgactgagcatctcagtggctcaacacagaaaagatgcatttcttgcccatgctatatgtctgaatgactgttgattggctgcaagtcaacagttctaaaataaaactatgcttagctttaaaaaaataaaataagggtcagtaaaatatctagttatttttctttatttttattttctcacattttcatttaattttacattattttataaatataactgtacaaactgtaaagccagttatttgctaaagagttttttgataaaacaaaatgattgagtagaaaatctcaccatgatctttgacttacttaatggtagttacagaaaacaatttatataaattaaaaggccatacatagtccaagcaaccaacaagtatttgactcatacaaatctgtatcatgatgtccattagctcaagatgttgacttttcttctttttcttcttgctggtttttttttaaactattttttttttttcatctagccaccagagaatgcttatgggaagttaacataaatatcaaacagtgttttcaaatattgtttatgcttgactgaatagggatttgcacaaagagtggttaaatatatggactaaaatagatgctccccattataaaataatatttggtagattacttataaaatttttcttgttattttgaaacccaaagttgtttatatatatagtcctactttttagatttaagccttttttatgtgtttgctattaactgacttagaaaaagtaataccttaaaataagaaaataaatgcttaggacaataggtagattgaaaattcatttgaaattaaaaaaaatctgtgacatttatttttgtgcatattagttccagaactgaaaataaagccctggcagtctcagtgtctatatatatatatgtgtgtgtatatatatatatatatatatatagagagagagagagagagagagagagagacatatatatgaatgatatgaatgtgtactatgatacattggcctttttgaattacttttacaattgctatagttaagccataatcatagcaaaatatttcaccaagatgaaaggaatataaaaatgtttctggcattataaaaattgcagtgaagaaattggaacttaaagccaaaacaaatagcttacataattaaaacagagctttgtctgtggtaaattttttggcctggaaatgtgaaatatttcttaattcttgaaagtaatagttgtgaacacttcataaaattatagtgagagagagaatgtgctgtaattagcagctgaagagataaatagaaaatcttgcttagtcgtgtaccttacattttcatcctgacaatgctgaatacattttaatgagaataaaataaattaaaattaaagcatcagcatagattctatatatactgtttttccaatccacattccaagagtacctctgtgtttaccattgctatatatatatgtgtgtgtgtgtgtatatacatgtgtatatatatatgtatgcacatatatatatacatatatatataatttcattagtttgggggaacaggtgttttctgttacatagataagttctttggttctaatttctgagattttggtgtatctgtcacccaagaagtgttcagtgtacccaatgtatagccttttatccctcagctccctcagccccttccccccgagtctccaaagtccatcgtatcattcttatacctttatgttctcatagcttagctcccactaataactgaggacatgtgatatttgattttccatccctgagttacttcacttaaaataatgatctccaactccatttgggttgctataaacgccattattttgttcgtttttatggctgagtggtattctatggtgtatatattccccatcttctttatctattcattggtgaatgggcatttaggctggttcgtatttctgcaattgcaaaaacaaataacctcatcaaaacatgggcaaaggacatgaatagacaattctcaaaagaagataaacaaatggccaacaaacatatgaaaaaaaatgctcaacatcactaattatcagagaaatgcgaattaaaactaatgagataccaccttactcttgcaaaaatggccacaattaaaaaaatcaaaaaataatagatattggcatggatgtggtgaaaagggaacacttttacactgctagtcaaaatgtaaactagtatagccactgtggaaaacagtatggagcttccctaaaaaaccagaagtagaattaccgtttgatccagtaatcccaatattgggtatctacccagaagaaaagaagtcattataagaaaaaaagacccttgcacatgcatgtttataccattgcttttagattttactttgcagacttgtaagaattctgtgatacaatgggaatatgttacttttgttgctgagttttacatgatagatttctgtcatataagtcagcaataaaattaatgattaatgattcttatgacctccttatatatatcttaatgagaccaacattaaagtttggcattaattaaattctgggccaaaaaatatattatttcagacgcagcttgtacatttttttaaattgacttttgagctgatgttaggtttgattagaaaaacatattcaatgagctccaaaagttgtgcttatatgtgatgtcagaaatatccggatactgaatacagaaattgaaatgaaagatggaaacctgaagaagactacttttgaaatagagtgatctaatttttatatttactaccttcaaagcccacctctcactgtatacttttttggggtaaaaaaaaaatgtgcacttcacattcccagttatctacgaactgactagattcatttaaattcattacatagttatcaaaccttcactacgttacaggactgtgctacatactggctagacgacaataatgaagctcattgaaaatatcattagggacacacataatttgctgagctttccaccaatggaattacctaggtgctctggtacatgaagacaaactttattctgcctggggaaagcactggggttttccagaagaggtcatctttggttaagccttaaaagaattggtggattttttcaagtagaggtctttctgagaacactgtaaactgaatgatcagtgtgaacaaatgtatgggccgtaagtggcctcacagagacaggagaaatgtccactagttgagtgtttattgtagcatctgggcgaagtgtgaagagaaacagatgagcagtgtgtcaagtagggaggagaggcgacagaacggagggaaactggaattgtgaggattcagtgtatgggacacacacagatgttgttggggcggtagacaggacttgggaactagatttgaactcttattttactatatgtatacttattttacccattattatacaatgctacatattctgataataaaataagtataaccacatctaccatgttcacatcttgaagagggttgaagaaaatcaaatgacgtggcttcgaagtccttcctccgaaccagataggttctgctcagtgagtgagggtgtatttgcctagacatgcaaatgaatgaatgagagaagtgcacgagaaaacctactatcaccaaagacctacgtcagttttcccaaacagctttattagtaatacagctaacatttaaattcaaaaatgataaaatgaggagaaatgcttacatttgtcatttgtattagggatgagtgactacaattgggaaacagagaggaagacatttttgtatttgaattgttgatagatggtaatgctaagaacaggataaagaatggaggagaaaaatgaggagaagctggggagagacttcaggtaggatctactgtttttttacagttggtgaggtgcctgcatgtcctcatcattgagctacaattttgttttgatgtcaaccaaggtgtaaaaactagatcatccgtatacaggtggcagttacacttgtgggagggaatgtgatgcccaggaatttgtgtaataattcatgtgttagacagttgaatcatgaatagtgaatgcagaaagcaaacatatgatgtaaattcttgaatgatatttatctcggagaatcaggagaccctgaaatgagcaaaaagaggatgactgccccatgaaaggagccctagagggaagagcgaaaagagatagaagaatgtattagggtgtgaacatcacacaactgatggataggataagacctgagaaagggatcattactcttgccccaagagagtcagtggtgtcttgcattgagtacttttcagtggagtggctggagatgaaatacaattgcaggaaattaaagaatgcatggaggtaaaaacaaagaaacagaaatgcagtctacactttcaagaaggttgatgatgatggaaagaaatgtgtttgagaataaaacaccccgtgaaagattagcatgcaaagacaatacaacaaaccaatatactgttttgtttttccctttggtcctattccaactagctaatggtggctgtatagccttcttatatgactcaccatttagtttaggttttctgtctccagggagagcataacatggtaaacccttggaatatcatgtctcctttgctagttttcttctttccagttcaggggattgcagtgatattttccatcattgactgcagcaaagatcccaaaggtggaaatatgcctccctcaaaggtactgatgtcatctccattaggaggaatttctgtataatctcactaaagacaccatgaagatttgtcctgtgttttcagtgtctgatggatgctgctgtaaggcagctcttagtttttatttgcacttttatgctttaatgcaattctccctctctctaggactcaagtatgagtcccacaggagaagggctggcagaggcattaagtgctagaccatgagctttattgcatcattctttcattcagacctggctcgtggttttaaactatagttgtatactctggcctctttttctttagaagatatttctttcttttttcttttttttaaggggcctctctgactatgcttacagacttctttttctttgtgagtcaatcctgcttgcccatcacaagtactcagattaggctaccaattggagtaacctgctgctacgttagttattacagagggaattgtgttatacagagggaataagttatacagaggtaatgatgaagtaggtaaagttcaaattgctgttctcttgcttttcattgaataagggagggagatggggtaaagggtagcaaactgataatggaaaggaagagtggtgctactttcattaatatctaaaaagcaatagccgacataactgtcttcatgctaaaatcaaaagtgtaagcaatatgataattcttaatactgccatgtgcagatgtaccaatcatgcttgtgttaatgcaccatgtaaccgagaagatgaagaaatcaaagacatgtgattacatccaaagaccaggagaaaatcacgatagtattgaggatactttcaaagtaagtggctaaggaaaattttgctacatctttcatgaatgtcacagaaaaagagacagtttgaaaatggaaatttttccaaatcttattgaagttttgctagtatattttactgagaattgagcaatgatttttgagatcttcattatgctgaagattaaaaataccaagttgttgtttctaaactcatttttttcagagaatagatagcttttcagcatttaatatgtacaataaattgcactgtggcgatacacagatgaatctgacacagtgtctattctatttaattaatgtcctgatataaaacgcactttagaaaacattaagcattataaggggtaaattattgaaggtgttcaaacagattatgttcatatatagcgattaggaaaagccttgtaaaaattttggcattagttggacctttataatagatagcacttagaatggcaagagaaaatatggtgccttccaaatagagggaaccacataaatcacgtggtagaagacacaagcaatgaacatagaatgcatggcctctttttattgggtcgagtgattttatgaaagaagttaagagaaatgaggttgaaaatgcagtttgaggcaagtcatttcataccataataaggagtgtgggttttatctgaaataatttcattgggtaactttaaaacaacttgttaaatgatctgatcggaaattctacatagaagctactgcagatagcaagccttttgagttctactttttttcccctttcaacaacttctacgtaagaagaattaaagtccacagactatcagaattaagggaactttgattttcttcctcaaaatgatgcctactgttaagtatgaaaggttaaccttactccaggaaaggaagagtaaatctatggggtcaggaaggctgttgtggtgaatggataacttaatgaaatgatcaaatagtcctgaatgatgttaattagggcaattttgtattactataattgctttgtatttattgaattattgcaatgggtgagttactagacagaaagaaatctatgcagtacgctgaccaaacactgaaaggatgacagaattggaatgctcttggctgttcaattcactgcttaagcagtctccaaatacattaggctattttttttctttttctctttttcttcttgctcattatctgctcattgtccttggatgggacagttccttatttgagagtatatcacatgttcagatctttttcatatatactttcctggcagacactgattctacaagtgttgtacattgtttaatgattttgtaaaacagatatttactgagagactgcagtaagacagactcattacccaagatcagtgaacccactgcatgcaatagatgaggaagcttctctcccataattccgaactgaaatacaaatgctgcctttagtcgcagaagttaaaaccttaaaagtttgtgttgaatagggaatgtcattgggggacatatcgaaccatgtgttaagatgtgtgaatggaagggtctggagaaaagagagaagattggaagagaaatgtatgggtggtacatgtagggaatagggactcaaagggaatgtctgagcaatgggagacactgtgaggccatgggatgtggcaatggcagcctcagctcatagtacggttacattatttattctttttagttttccagaaaaaaaataatattgccaagtatgccaacctaaataacaactcatgtttcaacactgtattttctaggttgttactggcaacttagaaagcctttactttggaaagagtgcttgagtggtattgaggttcccacattggcttagcaaagtcttctttgataacttacttctagaattatattaatgaacagtagtaacttgctatttcaaacatgatctttatggggaaatgtgtactgaactccagtaaaatgacaacagcatatatgtccacaccatgacagtcttttatgccactggaaaatgttcagaagtggaggcttcctgccagcagtagtggacagaagaatgaaagtaagagtcagattttttggaaaagcatttcatagctttcgtccccggtggctttggaggaatatgccacttctgttactgtgggaagtgcagtcagaaataatagtaacagtggtagctgccagggataggtctgtggactttgggaactgaagtacttgaatttgctatctttatcttgattggaatctatgactattttaaacactttctccaatttacaacggcttctctaagaaaagcttcacagctttctttcagaaaagctttgagaggtaggtttgattggcctagttttattaatgatggctttaaagcatattgagattgaggctgtcactgccaaacatagcacctctctttgtgaggccctatttctccaacatacacatttctcactctctgccactttttcagctgtccagtttctctgctgatctgtaaattcagtcatggaggaagaataagcttaatataatcttcttattagaaagcttttactgcgacaaaaaatccccaggatcttagctctaagtctcttcaacccctgtctataggacctacgtaaagggcaaaagtgtaaaataaataaaaggagataaaatgaggagaggggcaaaaacgaaagaattacttattaggaaaagtaagagaatgtgaaaaagaattatttgcaatgtcaaggtttacatacttctccaggtcaagtttatttttctccaacattattaatgatttattgaatctgaaccccaagcataattctgttctaggcagtgaggagtcataaatatgatagaaaatgttcttaccttcagagtggttacaatgtgatagaaaagtgtatatttataaaatattctaagttatttcaaaatagaattgagaatgtgacaaaagcataggctgtagaaaaaatggttttaggtagattttctctgggcagccccaccttccagtatcagtaaaaaacctgtgttgaaaattgctaccagacaatctctcttgttgagcatgtctaaaaaagtttcatgcctatcagttttgtattctatcacatatcagtatggtgcccttaagcagattccaagaggacctcctcaatcggaacatatcgcctcataaattataggattaatttgttttaaagatgccaactttctctcttattcaggaatgctttttttctgaaaatatacttagaatcttagtagatactctcgtgaatttcatgactaattctaatttgttcaataaactgttgattaaattacataaaatttgggcacactggataataagtacagagaactcatccctgtcccttcaaccttgctgtgggagccactgttcttaattttctaaataattccagtgagtacttttacttaaattatttgaataattccacctgtgcaaacctgactgcaatgggctgttaacctagaaaccctgagtattagattatatctgaaataattgccaagcttattgtttagtttaaccctagtttaactcagatataccaatgcctcattatgtttgttaactctattctgattcttcacatatgattaattatgatttattgagaacatcgttttccctctgtgtttactacagtccacagagtctataggagcggaaatctaatgggtttggtgttcactggagttgttcctttgaaataattaaggctttattttaaacttagcaatagggtaaggactgccagatatttctttatgtacttgaataaaatttgcttaaattcttcaaatctctggtctcaaactaattgatttctctgatgcagtgcttccttctcccaattgtgtgcctttaaatgaaaaatctctcttctaaccctctagctataaggagtttgccaaaggcaaagttgttaaccaagatttttattttgacccatagttccagctttcttttcgttttgacagttaatatgaatatacagaatctcagtgtattaggctattcttgtgttgctataaagcaatatctgagactgggtaatttatgaagaaaagaggtttaactggctctgtaaggtgtacgggaagcatggtgccaacatctggttggcttctggggaggtctcagggagcttacaatcatggaagaaggtgaagcaggagcaggcatatcacatggtgagaacaggagcaggagagggagtgggggaggtgccacacactttaaacaaccagatgttgtgagaggacagcaccaaaccatgagggagccttccctatgacccagattccactagtctctgccttcaacactggggattacatctgcacatgagatttggagggaacatatatccaaactatatcattccaccccgaacctacaatctcatttccttctcacattacaaaatacaaaaatcttgtcccaatagtcccccaatgtcttatttcatcccagcattaactcaaaagtcctaagtccaaagttccatctgagacaaggtgagtcccttacacctatgagcctgcaaattcaaagcaatttatttacttccaagatgaaaggtgggtgcaggcattggataaacatttctgctccaaaaaagagaaactggctaaaagaaaggggccctaggtcccatgcgagtttgaaacctggcaggacagtcattaaacctcaaaacttcaaaataattttgttttactacatgtcccacatccaaggcacactgctgcaaggggttggctcccaagggcttggacagctccacctctgtggccactgctctatcaggctgttgggtgtttttccaagtgcaggatgcaaactgctggtggatctaccattctgaggtctctagggcagtgtcctccttcccccagcttcactaggcaatgccacagtgggaactccttgtgggccctccaaccccatatttcccttctgcacttccctggtagagcttctctttaagggctctgcccctgaagcaggcttctgcctgggcggccaggcttttctatacaccctctgaaatataagtggaagctcccaagccttcttaactcttgtactctgcatgcctgcacgcttaacaccaggtgaaggccactgtgttggtccattctcatgcttctaataaagacatacctgagactgggtaatttataaggaaagaggtttaattgactcacagtacagaattgctggggtggccttgagaaacctacaatcatggtggaaggggaggcaaacatgttcttcacatggaggcaacaaagagagtgccaaagaaaagaggggaaaaccccttataaaactgtcagatctcatgaaaactcactcattatgatgaaaacaggatgaggggagtgaccccccatgattcaattttctccacctgctctctcccatgacacatgaggattatgggaactataattcaagatgagatttgggtggggatatagccaaaccatattattccacccctggaccctcccaaatctcatgtgcttgcaatttaaaatgcagtaacgcccttccaacagtcccgcaaagtcttaactcattccaacattaacccggaaagccaagtccaatgtctcatctgagaaaaggcaagtcccttcttcttatgagcctgtaaaatcaaaagcaagttagttacttcacagatacaatgggagtgcagacattgggtaaatacacccattccagatgggggaaattggccaaaacagaggggctacaggccccacgcaagtctgaaattcaatagggtagtcattaaaccttaaagttccaaaattatctcctttgactccatgtctcagatccaggtcaccctgatgcaagaggtgggctcccacagcatttggccgctccatccctgtggcttttcggggtacaggtgctcttccggctgctttcatgggctggcgttgtctgtggctttacaggtgcccagttcaagctgtcagtggatctgccattctgggatctggaggacagtcgtcctcttctcacagctccactagatagtgaagcaatggggactgtgtgtgggggctccagtcccacatttgccttccacactgccgtaggagaggttctccatgaaggctctgtctgtgcagcatacctctgcctggacaccagggcatttctgtaaatcttctgaaatctaggcggaggttcccaaatctcaacttttgacttctgtgcacctgcaggctcaacaccatgtggaagctctcaaggcttggagcttgcagcctctgtacccgtggcctgagctgtaccttggtcccttttagccgtggctggagtggctaggagacagagcgccgagaccctatgctgcacacagtaggggagccttggcccaggcccacaaaaccatttttccttcctgtgcctcttggcctgtgataggaggggctgccacagaggtctctgacatgccctaaggagactttccccattttcttggtaattaacactctgctccttgttacttatgcaaatttctgtaaccagctttaatttctccccagaaaatggggttttcttttctatcatattgtcgggctgcaaattttccaaacttttacgctctgcttcctctttaattatttgacgcttagaattgtcttctaccagatatcctagatcatctctctcaggttaaaatttccacagatatttagggcaggggcaaaatgctgccagtctctttgcttaagtataacaagtgtcacctttgcttccgtttccaacaagttcttagactactgtggcctgggcgtcattgtccatatcactatcagattttggtcaaaaccattcaacaagtctctagaaagttccaaaccttcccacatcttcctgtcttctgagccctccaagtctctaggaagttccaaagtttcccacattttcctgtcttcttctgtgccctccaaaccgttttgacctttgcctgttacccagttcaaaagccgcttccacgttttcgggtctctttacggcagcacccaactttctgtggtaccaatttactatagtagtttgttctcatgctgctaataaagacatacatgagaccgggtaatttataaaggaaagaagtttaattgactcacagttcagcatggctggggaggcctcaggaaacttacaatcatgatggaaggggaagcaaacacgtctttcttcatatagcggcagcaaggagaagtgccaagcaaaagggggaaaagccatttataaaatcatcagatctcgtgagaattcactcactatcaaaagaacagcatggaggtaaccactcccatgattcaattacctccctctgggtcctttcacagcatgtggggattatggggactacaattcaagatgagatttgagtggagagagccccaaaccttgtcagccaccgaggcttatggcatgccttctctgaagcagcagactgagcagtacctgggaccctctgagcctgtggctggagttggagcaatcaggattcagggagtagtgttccgaggtagtgtatggctctgatactctgggcctggcccatgaaaacattttttctcctaggccaaagggtctttgatgggagtggatacctggaagactgctgaaatgcctttgaggccttttccccattgtcttgtctatcagcacctggctatttttgagtcatgcaaatgtattaagtggttgcttcacagcccacttggattcttcccctgaaaattttctaacacctggccaagctgcagattttttaaacttttacactcttcttccttcttaaacagatgttccaactttaacatcaattatttgctcctgcatctgaatgaaggctgcttgttagaagcagccaggccacatcttgtacacgtggctggttagaaatttcttcccacagatactctaaattatgactctgaagttccaccttccacaaatccttagggcataaacagaatgcagccaagttattcactaaggcacaacatgtatgacctttgctccagttcccagtaggtgccttacttccatctgagaccttgtaagcgtgaaatttcactgtccatgtcatatcagcattttggtctcaaccatttaaccagtctctaagaagttctaaacgtttccttatcttcctgttttcttctgagcccttcaaactcttccaaccctttcctgttacccagttccaaaggttcttccacattttcaggtaatttttagcaataccccactcctcagtacaaattttctgtattaggacattctcgtgttgctgtaaagaaatacctcagatggggcaatttataaagaagagaggtgtaattgactcacagttctgcaggttgtataggaggcatggtgctggtatctacttggcttctgaagcctcagggagctcacaatcatggcagaaggcaagggggaagcaggcatgtcacatggtgaaaacaggagcaaaagagggagtgagggaggtgccacacattttaaacaactagattttgtgagaggacagcaccaagctgtgaaagattcttccttatgtcccagaaaccacccaccaggccccatcttcaacactggggatgatatctgagcatgatatttggagaggccatatatccaaactgtgtcactcagtatggcatttcatctggataggatgtacaactaagtagaagcccccttagtttcagatgttgagtatttttttcctaagttacataacatttggtctacattagtccattcatataacataggtatatgccttgatgatataacctattttgtcttctcgtttaaaatcatttaatagaatggatttcaagtcagtaatgtcaacagaattgaattcaaagttataaagagtcctagaaggggtttttttgttaagagaaggattcaaactgtggaaaagagataggatatatgtagaattccacttgcaattaaaatatatgtaccgttattttctcttttcctctactcttgtgattacttctattccttaaatggaaacagctgtcattaaaacgtgaaaatatttctgtttaaaagcaaatatttattgatgctaaaagcatcaaggaaacaaacacactttcaagttaaatttgttattgtcatggtacactgaaatagattttgttatactttatatgcctgaaattagtatgctatgcaaaaggattagagtgaaagatttaagcaggtcagcagtgaagatgctgccagtagctggtgttaaattgaacgtttaatgtgtgtcagctatatgaatttttctctcttaattttcatggtaacttgctgaaataggtaccattcctatttaatagatgataaagttattcagagagtttaaatagctgattgaaacgtaggataacaaagacaataatccagaaacaaaattgttctagcttacacactgtagtatccaagttggcaaaaaaaaaaaaaaatctttaaaatgttgttaaataaattataattaaattgaaaatcaccctaaattgaatatagaataatttgtaataataaataaacatgcattcaacatgttaaatgagaaaaagcagattgcgcacttcaggtataatgattctattttatttcatgtgcttacacacattgggaggctgagatgggaggatcacttgaggccaggagcttgagaccagcctggataacatagtgagatgagggcatctctactacttagggcacactggcatgctcctgtagtcccagatactgtggaagctgaagtgggaggatcacttgagcctgaggctgcactgagctgtgatagcaccactgcactccagcctgggcaacagagtgaggccctctctcaaaaagtaaataaaaaataaataattgtgcttacatatttatcttaccaatgaagattgagttcagctgcctgtaacagaacaccaaaaattgcaatggcttgagcaaagttaagtcatttctcttttatatagaagaatacagaggtagtcatccaggacagatagagttgtggtcatctatttcttgcaccttgctaacatttgtcttccaacctgaggatcattctgtgatctacaattactgctggaattccaatcatcctgcctacattcctggtgcccaaagggaggaaggaatagcaaaaggccgggtgggtggggtggctcacacctgtaatcccagcactttgggaggccaaggtgggcggatcacctgagattgggagttcgagaccaccctgaccaacatggagaaaccccatctctactaaaaatgcaaaaaaattagatgggcctggaggcacatgcccgtaatcccagctacttgggaggctgaggcatgagaatcacttgaacccgggaggcggaggttgcagtgagccgagatcgcaccattgcactccagcatgggcaacaagagagaaacttcatctcaaaaaaaaaaaaaagaaagaaagaatagcaaaagaaacacacttcatttatttgtacccatattagtaatagtaccttatccagaatgaccctagaaaaccatttacttattgttcattggccaagaacataattacatggccacacttagttgcagggaagtataggaaatatttatagtctgtacctagacatattgctgccctatgtacctagacatattgctgccctaagtactattcttggatgaccatttagcggcctctgtcatgacatatttgtattgaatgaatgatgatattaaaaatacacatatgcataaacatattcacacaaactatatatgatatatgctatatagcataattttattatctatgtgcatttttctttacttacaaatgtttaatttggtcatacttgatttagtatatctaatagtcgttataggtcagtcggtcatatgtttctttttatttataatttaaaatatattttaccttatataattacacttttaaaaatgatatgtttaaaaactaataaatttgaaaatttatacaattcattcacgcttttccataaaacaacacttctggcattaatgagtcactgctttccataaagtatacataacaattatatgtatttattacacattctatattatattatatatacattaattatgatatataattgtatcatgactatgtataacttcatggtattatgtatataacatcgtggtattattttcaagccttttgttaatatcagactgttttacatagcaattaggaagctagaaatgggttcaaatcattccgttggtaataatttgaacttacttttctttcatggcatgaaagtttttgtgtgctactttttactattcctaaaccaagaaacgtgaagatcatgtgaatgtatttgctgttcaattggaggtcagacgttcaactcaagaaaggcttggcgcaagataaatcactctgctgtgaaatgagtccataaacacaatgcacttgccagccctcaaacaaagtagatttacaagtttttaaaaatctcagtgagaagtactgttgtttccttgagtgtaagttactcttattcatgaatatgtttaaattttagaaaactggaccacaaaagtctatcctaactatagtagtctgtgattaaaatggcaaaagcaaagggtgtatgatttttaagctcattttagtgctattttctagtgttttaaatttttttggtttgttcttaaataggttttaattggaagtgttcttttgagaaatggaactaaaactttgagtggggcagtatacttttaaagtcagagtctatccttgggttcataagttcattcaatttggaaattaaaagtagaggaaactgacaagggagttggggcgtgctgtagaattactctcaaagctaaacatggagttaaaactgtgtcaaaaccataattagtatttgcccttgaattgtccttgttaatagaagtggaacagtggaaaatactgcatagaggcattgtctggaaactgcatttcatagccaataaattcaaaccaccttagtggaatataattatgaggaggagctatagtctctgtggctgaagaaaaaacaacaacaagaacaacaacaacaaaaaacgcagagcatgtcttgctctacattctaacttgcatcatggaatccgccggatctatgccattttggatttcattgccaccggttgaaattggtagatttctttttcttaagtcggctagaagacctaattttagtaagcctaaagggcactgagcaatacaactactttggtggatcgtttccagtttgaggattcctagtgcacaatcagtgaatgttgtatggaacgcatggtgaagaaatacggtttagtgaatctggaaacttaaaaaaattggccttggcatcgtgaggaattcccatttggccttcagcatttttgtctatgttggcttttctgtcccaagactttctataatccaatttatcacttgctttttgggttaaagggaaataaaatttccacacttcttcaatacatgtgctggagaggacaaggggagggaatttattttgtgtgtgtgttgtaaaatcagaagcaattgttgaaaggtgatgaacagtttgaaaggtatgttgttctcttgtactacatccagtggttactatgaagtttttctcatcactcttttgtatcctttcttaaattctgctgtgtggcagagtatcttatttatctccatattaacatgccttttgcaaggtttagttatattattgcaactgttctcaaaagatacaagcttcctcctaaaacacgtcacaatcaggttttgctagacagctactaacagccttaaattaaacaggatctcaggatgtcttgtcagtttgggttttcagctgcagacagttgacaagggataaagaggacagaactaatgccacatgccatctccctccaaagagagaatccttgacccctgagtttaccattctcatttttgagattccattttcacttctaccacatacaaattgctttccttgtttttaacacagtgaagtaatttgaaaaaaaaatctgataatgtatctcatatctctatgtcttttaataggaagagggcacatattaattcaacgtattcatttgcaagaacacaaaatcctggacttttttttttaacttactgatcattatatatctgagaaatttggtgtaacaccaagtcttttgtcatcagtagctcccattttttaaagacttctatctctatattcaataaatgtcacaattatttgctatcattattttaatatgtttactattatttttattttaaaatatgttctcattttcatatacttactattttatttttagtttaaaaatattttttcagaaacctaaaatgtcagtgaatacaggtaaatatttattcattttgactacatagaaatctaaagcaaatattgattgtgatatgtacatctacatattaatataacatttttataaacgtattgtttctgtttcaaacatgagtcttggtcaataattgatataaataaaaattcaagttttccacaaaattttgcttatgtaaaattaaataaggtaacctttatattcagtcagttctggctcctggataaattgcatgcttagaaatttcactttaataaaataaaagttttctcctcatctgtaatgtattctcccttttactgtactggcatctacatattgactgttttcatgaattatttcttcccaagatccctacaaagaagtaaaactcattcataatagattgtatattaatccccaaattccatgtaattctacagaaggaaaaaacataaaccaaaatcatggtacttgcagtggaagaagcataagcatcctacatttatacccttttccccataaatacatagtgtggctggcagcctgcacagtaatgattaaatgagacaataaaatcttagcaattcttaccctgagtctggaagtgattaccgtgtccaagagcaagtcatttcctttttctaggtgtagtttttttattctacaaaatactaggaagagattatctccaacagaagtcacatcttctgggtcaaattaggatcacaaacatgtgtttgtgtattaaaatgttttaaatttgaatcagctgacaatacttcaaaaattgggagatttgatattaatatcttgtaacacataatgggtaaaagactgcccctggcaaaagcctgcatctctggttctccagaagccccacccttcccccttgctaccagtcacttaaaccaagtctgtgttgtggcttaatgtctaattgcctttttatttaaaattctgactttggcccctggcctagaatgaccattaatggtatatttagccatgatatctatgattctttaaccaataactgcttaaggctatccttgccttgatgtttctcccagagcttgcctagtcaagcttcatcctcttagttaattatggtcctctatagaatatgtgctattctgtcttttaaaggcttttccagggatacatttgacatatttaaacatgatagctaggtaagctgtttcaaaggcattatcctccataaacattctactcttgtataaaaagtcatttcaaaatatactattttactagatttattcatgattaagtcaagagttgctccatcggattagtatttattttcaattgccttccttatatacatgttagatagcgttgcactctgaaactggatttgaaactttatttttttctttataaaatattagtgcaaaaatcacaaagggattcaaaacacacacacacacacacatactcattattcaatagattttgtatgtttgaattcaagaaatgatgagttataagttatatctgaaatgtccaggagagtgggtcttaattcagaaagaaaaaaatggaaggtagttaaaaatgatttccatagtaaatactcaatagaattattcactaagaagaaggaaattatgttgaaaacttaaacttttgaggcttttcaagagtgttaacaggtatctgtgacatattttttagtactttaatttggtggacatattcttataatctgagttacaaatcaatttattaaaacttcaattagtttttgtgaaaataatgctgtacaataaatgatgcaaaatgtcaattgactaaccaccgacaaaatttatccctcactgaaattcctgtatgttgttaatgtgtccctgctttgggctgtaggttgggttcaggtatctatgtgtcttttaatctggagcctatcctttgctggggaataatatttgtacaggatagggcaggatcgcataaacaagtcaaaccacacatgtgcatctacatcctggttggatacagcttattatattaactcacattcgattagttgaagcaagtcacaaggtcaagctcaaagtcagtgaagaggagcattatagaggcattgtggctaaaccacaataagccatttcaatgtggggaaggaaggaagaattgtgaacacataatactatctgtcacatgaaatatgcttggtaatttgcattattttggatatttcacataacaaattcaaaatatagcttgagaaagataatagacaaagatgtcacatattttggaatgatgtttaagaaagatgatgctgtttcagttctgtaagctcttaatatttatcaatatgtcatctttgttttaaaatgtaaagctttatctacatgatgattgtgaaaagtgggtaccaagttttgggctatgtaatagtacatgaaaggaaatagtcataagaaaatcatgaatttagaaaaacaccattgcattgatagattttattaggggtgtcaaatgtttcagcttataggttagagaaatataagcccctcttttcatactgctatgtggtatgacttgctgttattataaacttctgtacattgcacttgagtttgatgaagatccataaagatttagtcattgaaacataacagccattgtgccacataaccttgggttgaggtctcaattcagagccaacttcagacagcaccatgaataaaatttgatcttgccaatttcacattccccatttctcccattcaatatgtacacatcgatgttcccaatgtctttattttgtcctttggctttggattccatatatatatatatatatatatatgcacacatacatatatatatgattctcctttaatttcactcagtatcctgtcttacccattttgaacatctgtttaataaacagttattattaggcactctgaatttaaataatcaggagacatggttccctaggatggtggtattcaaatgattttacaaaaatcctggcagattataagaaatagattttaattgcagtccactaaatacatacatatacatgcatacatgaagcaaaaatttcacaaataataataaccttactacaggtatacattatgatttattttatttcattgggggtgagtgttggtagccactcactaaatgaatgtcagtccctagtgtttctgaattcagtgtataatagcactttaagattttaggtttaatggtggccagggataagggtcagggaaaggggcagctacacatatctccagtattattaaatgccaaataaatagtgcagataataagtgctgaagtgtttagaaaaaggggccaggcgcggtggctcacgcctgtagtcccagctactggggaggctgaggcaggagaattgcttgaacccgggaggttgagactgcagtgagctcagatcatgccactgcaatccagcctgagcgatggagcgagactctatttcaaaaaaaaaaaaaaaaaatttagaaaatgaagaagcttattttggctaaaatgtaatactagaagttatcaaagatgaagaagaagaggtaggacttgaatttcatattagtgtttcaaaatatattaacatgaggannnnnnnnnnnnnnnnnnnntggagattttctttgagtttctgatatggaagctagaatgatgtaaaaaatatttaggaaggggaattcgatatgcaccatggtcacctacgtgctattgtattttttatgtttttcttagatttttcaataaaaattctaccatgtgttttctggggcttgttagcaatttagtaggagttatattgaatagtactttaactcaagtgaaggataactaggtacactcttgagacaggtgttcattggcatatgatgtattcatttcacacattataggttctagccttagaatttttcatgttttaaaagcattattccaagcatccaatgtatgttgcgtttatcccatatgattttgtccagaatggttactgtccacagaggttttatctttgtctgtggtattaagctttttgaggacaatgcaaatggcttcatattcgagaatgataataatttggtcaacttttatgtactgagaaattaattgaagatttcaaaagactaaatagcatgaaatatttataattgctgtatagtgaaaaataatgagagattttcctatccttatacggtattttgcagagggtataagcaaaagctcttgtgatttttattcattttgggggggagaattggataaattatgttatgtgtttaaggtactggtttttgttttattgtaagcaaacttatttactttttatagtgctagtcgttatcaatgccagaggactgctgaattgtcctgttcccacctccagtcctataggacttcaccatctaaaaacaccttagttcccatacagctttgctctagagtctagaaagatgctaatgattatatgctagaaggaatcaagtaatatttggaggaattgttcttgtgtcttctagattatcattttagaagcaaatcatgctttctgtgagatgtccataagtgcctctatcagagacggattataatgctgtggtgttatgggtctgattctgtggggagaatttagcttactaattttgaacatatatgcaatatgtatcaaatagtaagtgctgcaaagtatgtccctgtgctttaaaagggaattactgaagaaatttctaatttcacaataaaaaatattttagagtagcagggacttgtttttaggaaggaaatctgccatatattagcaagcaccattacattttaaagtgatatttttcaggcatgtaaagagtcaagttcttgaaaataagaacacctttattatcatgtaactgcatttcagcactgcatcgctctctgtattcccctctcctctccttggctacctctctcacctttatttcactctcttccttctaatcttgtcactttgcttttcctgcactttccttcctcgaggcatttgtttatgcagtttctgtagccccacatgcttattcttctcctataggtaaacacaattccaatttttcaaaatccatctcaaatcacagagccttcacgatggctcccaaagcttccatcagatttaatttgatgtccccatatttgccatagattgtgcttttaaaaattgtagttatccttctctgtcttatttaatggtaatttatgtgtgtccactcatttcataatgctctactgtaggttaaggcctatgtctggctcacaaacatcttactcattgacacagagatttgcatagagcagacaccaaatagatagttacactgaatattttatgaatcatattaaaatctataggtggcttttaaccatactttattgatgttgtttaattagaagtctctctcaaaaacttcatatgctttgatgctggggaggatgcctcactcattgttgtatccgtatttgtaactaacatttattgagttccagttatgtgacagactcctactagctctttgcactttatatggctcatctcattgagttcttagaataacccaccagaataggtgggcagtaatagctgcagtttataggggaaaaaaaattatgagtcagaggctaatttactttccaaggtttgaagaggcagtaagtgacaaaaccaagataaaaactcagaaagcttcattactttctgcaaaccttgaacaatctagtgaatgaacgaatgtgtcttcagagttatgacataaccagcaggagaaagaaaccatcatgcgacttcctaaaatacgatgcattatttctttcaacaaattatttaagtaagtgtactatgcttagtagttatgtgaatcattatcttggattttattaactgtagggctgtagactttggaaagaaagatcctaatactgtgttcaggaatcaatgagaaacaaagatattagtagaaaaatggagtggaagagaggcagtgggtgtatcgattatgtactttggtgattatgatttctatgctatggatatttaaaattttattttcctcttaatcttcaatttccatcttctggtaacttctttagatataagaccaagacactttctttaccgttatatctgctagatttttatccagtgtattttaagaagtcttttttatccagtgccttttaagaagctcagtccgggtgcagtggctcacgcctgtaatcccagcactttaggaggccgaggcgggcggatcatgaggtcaggagttcaagaccagcttggccaacatagtgaatacctgtctctactaaaaatacaaaaattagctgggcgtggtggcacgcacctgtagtcccacctactcaggaggctgagacgggagaatcacttgaacccgggaggcagagtttgcagtgagcggagaccacgccattgcactccagcctaggtgacagagtgagactccgtctcaaagaaaaaaagaaaagaaacagaagctcaataagtgttatttgggataaagcattaactggtttaaagctcaagattttaaacaactcaggattgggcattaaagaataacagaagctaccatctattgaatttttattaagacatttcaggacaccaggagtaagaatacagggtagctgtatttgttatctattgctccataacaaataattccagactttctggcttaaaactactcattatctcacagttcctttgactaggaattcagcatctctaatttaaggtctctaaaatgaggttccagttaagcgattgacagggtctgtcgtcttatctcctgataagactaggaggcttgactagtggaggatctgcttccaagcttacttgtggggtctcagttttctgctgtctgtgggccagagctctctttcagttgcttgctatgcaggtggcctcatgggactttctcatgacatggcaactgggttctccatggtgaacagtctaagaatctgtcaagatagaagccacagtgtttttataatctaaattggaagggacattccatcacttctgccactttctattggtttgtagtaagtcagaaagtctagcccacattcaaggcaagaggattatggaagggcataaataccagaaagagaattttgggtgactcccttagaagctgcctatcaaagtacttaccctgccattctgtctacttatcattgtatttctctttaatttgatcttgaggttgtaaagtggctataaactttagccctgccctgatggagttccaggggatttatttggctgtgggtatttatgatgtgcctttcactggatacttctttatcctagtggataacctaattcctgtgcctaacttgttactaggtatacttcacacacacacacacacacacacacacacacacacacacagacacacacacaaacacttatttatgctggcagactgacagtcacctttgcagctcttgtctgttctgccaagatagtcactctctgggaaagctttgaccagaagaaaaattgggtatggatgtattggtcaggagacgtagagaaggcagcacagcaaaacatatgaagtataagaagcagtttattactcatgagtccacgagagaagacggctactatataggaagcagggggcaaggttgcaggggcaatgtgctgaaccatcagatcaggagcagatagaaagaggacctgtggggccatgcctttattgagctatgggggttacccgttaggctttcccatagaggttattgattggctaatttaaagacaacacacatgaagaggggagcttattcccatgactctggtgttgacattaggttttgtggtactagctgtgggtgtgctgagctgtagatcagtaagatgagaatcaagcagattaccttacaaatgaccacgtggggagaggaagatttaactgggccaggggtgagggcagggacctatgtcagtcctaaagtagatgctgaggcagcaactatgtgaaacacatttatgacacacatgctcattgcagatactagtaattgatgatagcattatttcaaaatgagacaagatttgggactacaaaacattctcgaggtagtgttccaggaagctactgactgtcaattatttaggattggaactccatttgaaatctatttgttctttatattgtttttttttaagtttatcttcattaaaaagctgcaaattaggtattcatttttttattccactttggagaaaacaacaacactaagaaatgtcaaaattaatcattgatatatttgtgaccagtaccttcaaaactagttcaacctactgaaaactactcaagctctttccaccacataatagcactttcagatattgtttttgcagcttaaagggaatttgcatttaggtatgtgtacaatatcaacaaattggtgctacaggcacattcaatgttcttctttttagaggaaattaaattcaatttgattaggttgatgtggacaacattaaaataaatgttaaccttattctgtatttatgaatcaatactgatagttttaagatacctggccattctacttgttggtaaggtcttggaataaggaaatcttgacagaagttttgaagagtatattctttatcatttcaaactgtgaaaactatgcactttcctaagagtagattttaaagtcacacaagggatcatgctgaaaactgacttctagagtctttgctcagcaggttgttgcattttttttctttactattgaacactcttttgttcatgccttttttcttattgcttgcagaaatgtgacaagcttcaaacttacacagaaagaataagtagtagagatactaggtatcattgcacagcccagatgtcttttgaaaatatttattcagctgaactagaatttcaaaatctattagaaaggtaaaatatatcttggaaaacaaaagcagattttgaataaaacataggtaaaaaaacttttaagtaagaaaatatgaaaaaatggcaacagctttaaatgataacttgatggcttccacagaataattcatagtgtaggtattttttattaaaacttgacaaatattctaaaaaatgtaaaagtgaaaattaggtattttaactgagaaagatgaaattggcaccatctaaaaaaattttcatgagttccatttgtgttaagaaaatatttcttatttaatcaaatacatgtgcaaaatgttatcttaaaatccttttagagttttgataaagaatgctcaatatgagcatacatattcagccattagttatattcacattctcttccagaaataatctgttaataattaaatgtgttttataaacacttacataatgaaactcaaattagcttctcagataaattgttgttgctgttgttcagctggtattgttataaaccatcattcatataactttattatattgtgagtgttttcttggaaactgatcaacctcagcatttaggatatgtggactattagatggagaaatgaatatttgccttagcatagtaataaatattgttagactgacacaaatattagcctgcactcatagtgcctaaaataggccattccagtaattgcttagaaaaatattatttgtacagcttgtagaaatttacaaatgaacagaaaaactctgcatttgacctaggatatatgaattcttcaaataataaatatatcaaatatattctgagtttgaaatagtctttaccttgagccaccaaaaaggaaaagaaaatagaatcaagattacttgttaattttcaattttggggtgaaaaaccttattaaacttctccagtaactaaatcacataaagttcttcagtacaagttagattgtggaaatagttcatgtagttattccacgtctccttctaacaaaatatcaacagttcaaatatccagtttccttttcatttatgcaccattgtagttgctaatataaatgttggatctttctgcctcccactcacacctccagcccctcccctgcccacgcacctgcactggctcacattggtgctctttttctgcgggctgcgctgagcagaaaaggtgaggctattcagggttctgtaatgctcaattccatgttccgtttcttttcctcagaaacagttgaaacctatctatggatgaaaaacgcttcataatccaaacattacttcaatcagatgtgaagagtgggtttgctgcactgtaacatgctattattgcttaggtttatttgacaaaagtgaacaaccacaactttcaggaaaaactttttttttttgaattttatgtgagttgtccttttggaaatagatagatgagagagagacagagggacaaataatctgtatgaattttggcttttctcttgagtataaatgtttatctttcccccttcaatgtaacttgcttggatgttcaagtgtggagtacatttcttttctaaaagacaacatatttttcaattttattcattgatttatcactcaaaacatgcacttgaaggtactcttagtactctccttcatggccagtttatctataccgttttttcagagtttcttgagacagcttgcttttttttgtttgtttgtgttttttgttttgaccgagtctccctctgtggcccaggctggagtgcagtgatcttggctcactgcaaactccgcctcccgggttcacactattctcctgcctcagcctcccgagtagctgggactacaggcgcccgccaccatgcctggctaattttttgtatttttagtagagatgggttttcaccgtgttagccaggatggtctcgatctcctgacctcgtgatccgcccgcctcggcctcccaaagtgctgggatgacaggcgtgagccaccgcgcccggcctgaggccgcttgcttttaaagagctctcgcaaacaggtagcataggtgactgccttttgacctaaaatgtgatattttagaatatgttactagaaatttgcaataatgttcttaaaattattaatcttattgatgtgtttctggagcccagtaccaaacactgatcctaaagattgaatttggaacgaggccaatttagtgtttccctaaactgttttgggtagaacgctaataataatgccatgtgcttttactagtatttcatagccaaatacatttggggattacagagttagcccactcgtagccgtcttgtggactgcacggagcctttactgtgcttgcatgcatcatgcacccacctctccgagagtggtgtcatatatgtccattgattggaatgagcaggttactcctgcttccctctgtagagcgcatcatgcagaattgtttgtgtgtgtgtgtgtctgtgtgtgtgtgtgtgtctataccactttggatatcactcagttaacagttattgtctaaatcattcttgtgataagaatgataatcttattatataaatgatagaactatacttgagaatacagcctgattgttttatctatccattttatcattaaaagtgaattgaaaactttactattatgaaccctgtcgtttcctattgaggttctttaacactagaacctgcagaattagccatactttgacattaaaactattacattgccatcctctctttttccctggtgaatatttaggtgcactttgagatctggtattgctctagtggtgtgcctattttttttaaatattttcatttttgtttaatctacagagaagttccgagatcctccagagctctgatgggaagaattgtatagcgtgtcccctgccaaaagttctaataaaaaatttacacagcggaggctttgattaaatgaattattcattgacaactatccatcagggaattagaagtttatggcaacatgagctgtggaaaatagaaagaaaaattacccattactaactttttaaatgagaaagtcagaaactcagattgaatgtgaatttaaccctgcacatggaaagacactatgcaaaatattgagaggagttacataacctttatgcaatttattacttaataagcacataattggctgctaattaacagttgtagcatctttctttcttgtctttcctctcgttaagcgtaatattatgtgtagaactagcatagtgtggtttctgactttaacattcttctgtaagatcacttgtgttcagcacctcacacagggttctattcacagaatagaatcctattttgttttcttttatattagaaatagtccatggcatcttgacaaggtgttatgaaccagagaggaaaggtcaatgatttaaaccagctttaggagaagcatatatagaagttgtttctcggctttctggaatgaattttaacagccacctataattgaaagcatttcatgcagggcatttcacaaaatggacattcaaaaactacaggttgacctgtactgaagacgtgaaattgctttgtgcctttgagaagtactcttggataaaccatgccattgtctatattgagttccctgattaaataatagtctctctctatctctttatctctctctagctagccatccatctatatatataacacatgcacatactcaaataaatatttacataacgaatctatcgatgtatattagtaagtactatgcattcagcacatgattagggtgcataatctcatatgcacgttgcaaaaatctttgaggggtagtatcattagtaatatttcatatatgacaaaactgaggtttaaagagtttaagggacttttccaagttcacatactaagagaaacagttactatataagtcacgttagccgcaaaggcaagcctttcttctttttttggatattatataaaaattatatagaaaagtttctttttaaacctaagccatgggaacaattcttcagttttcattttattctagtaaatttcttttcttttctttttttttttttttttgagacggagtctcgctctgtcgcccaggctggggcgcagtggcctgatctcggctcactgcaagctctgcctcccgggttcacaccattctcctgcctcagccttccgagtagctgggactacaggcacctgccaccacgcccggctaatttttttgtattttttggtggagacggggtttcaccgtgttagccaggatggtctctatctcctgacctcgtgatccgcccgcctcggcctcccaaagtgctgggattacgggcgtgagccaccgcgcccggcctattctagcatatttcaactcttggtggcagaaacatctttcttaaatttcacccagaagtgaattacatgcccaccctttctttttccggatggatatgtggagagaacaattatagttctactttgctcttggctgtaggtatagttgttaataattagaaaacactcgaatggcaggttgccaattagagaggggagtataaagatacacagaacccgggcaattcaaatttgggacaatcgcctttaaagacattgagagttcactaaggttgctgatgaatcctgtcacttgtatcagtcaaaaggataatttgtaaatagcctgtagagaatcaaaggccagaatatactctcttttctgacaagcagaaaacacattatatgggctaattttccctgcatttttatcttaaaaaaaggagatgggtttctaattctgcaagcaaatatatattttttctaaatgtgagctatttcgaaaaacctaaaaccactcatcctagagcaagaacagggctaggttgagtgtccaagagaagactgtcacaggacctggcacattagtgagaaaggtgacattactccaggggaacttaatgatgccatttatttcttgatgctctgaggtacagcccccatttagacagattactctgagaattttgtaagatatccaatgagatacaatcatctttattggtggcactgtaaaggcaagtatgagagattttggcaagatcatctttttttagagacacatttatcatattcctttttaccttctttattaagtaggtactaatactatttctgattcactgctctctactccaaggattgcactaataggaaaattttcataaagcttttggctaagaactcctgctattgacctatgcccctttgtgtctaggttgatccagaagatacttcagcataaaaataaattccaacaaaatttagtttcaaattataaaagttgatatttctgctttatttgtccaaaagaggttctaaaatgaaattttctcaatttcaggtccattaaaaagtctgaatcttataaatatgcatagcttttataatacttataacttagatattaagaaaaatcaagatgtacattattaaagaaataacatttccattgttttcctttctcagaagtgggataaacaagcactgtaaactgaaataagcaatgcattctcagttccctcccaaaagaaaatactggtgtgcctgacttaccatttcagaaagtccagaaaacgctgcaaactaggcaggcagtcaagtgcaatggcaatgaataaccttataaaatttccagactttaagactgtcagtctggaagactacactatcttttagcacaaggtacttttggagattactctagggatcttagagaataattatacttaagtcctgccagggcctttttttttttttttttttttttttttttactatagtcaatagtacttccattgtactccttacatgacattatgttacagaagaaaatgttttataacaatgtcatttgagtgcttcagttgttacctctccttgaatacatatgaaagaataattacctttgtagtaaaggacattctagttatacatctatactttattggtttcttcatgtttttctcttcagaagtagaaacttaatgaaaatattgcgtaagtagagagcagtttatgacagtatttctttctaaataaattaaagattttattatatcttgaaatatatcacatatgtaaaatattaagtataatgtttgtgatcattttgaaacacagacttttaaactttaataaattatatccaagtaacattttaaatttgttatctaacttctactgttaacatctgaaaaaaattagaattggcagacatgcaagatgatgttgactttgcagccagaaaatgtggaaaggcctcaattagtatccctgattcacacttacaaatgggtgtttcagtgctgtgcagtttgataaggtagttaaggccatagtttgggagacagataggcatggattccagtcctggctcaggcatttctacttacgctattcgggcatgtcagtttttctttctaaggctcatttccctgtgtgtccatgaggaaataatgtgtttccttggtagaaagatggttgtgagggttcagtgcaatcatgcatatgcatagtaagtattccatatatctcaatatcatgatttatttcttgctacacaaacttacagtctactcactacctttgatgtaaagctgtcccactgtccttctgtgctttttctagaggttgagctcttccttcatttctggaatagttactgatttcaccagtaatttgccttttagatccgttgttacaggtgcctttttgaatctgactgctcaaaagctttgtccattttgtgttgctataaaggcatacatgaggctgagtaatttatgaagaaaggttttggtgctcatggtcctgcagactgtacaagaagcacggtgccaacatctgcttggcttctggtgagggcctcaggctgcttctacttatggtggaaggcaaaggggagctgactatgcagagatcacatggggagagaggaaacacatgggggcaggtgggtgatatgccaggctatttttaacaaacacttccctgggaactagtagggtgagaattcagttgccccaagggaggacattaagctattcataaggaatccgtccccatgaccaaaacacctcccactaggccccacctccaatattggggtcaaatttcaacttgaagttggaggagacaaacatccaaactatagcagaagcctttttttgttttttaaagctttagctttacctgccatatataatagttcaagcataaaattcaatgtcttttagcttttttagagttgtgctgccatcaccataatgaaactatgagacctttcaaagagaagacaggtgtaaacttgtgttatctttgattaggttatgatttattagatttgacaccaaaagcgcaagcaatgaaagagaaaaattcaagttagacttcaccaaaattaacagctgatatgcctttaggaagcatgtaaactcagaagccattcttacatgactggctcatgggcatcattgatttgaccagaaatggacattaaaaccatgggaggctgatgcagtctctcatgtatgaatttgaaatagacacaagggaacaccatgaagagaatctctgtggaccttaacattttcaaattttagaaaacaacattttactatgtggaatggacagggagagtgtcaatgagaaaaacaggaggaggaggaaatgaagagagtttggcttaaaatgttaccactcaaaatgcctagcatgaattggggcaggtccatgaactgcttgttattggtctctacccaataaggagctggctccagaatgcagttcagttgacattttcttttgtaagaaagattttctcaattaaaaaaaatcaccgtgttgatttgcgtttgatagaatcttgtcatcagacaccagaattttgggtagcatttttcttttttttcttttatcttttttctttctttctttctttttttcttcttctttttttttttttttttttttttttggagacaggatttctgtcgcccaggctggagtgcagtggtgcaatcttggctcactgcaacttctgcctccttgctttaagcgattcttatgtctcagcctcccaagtagctggaattatagatgcagggcaccacgcccagctaatttttctatttttagtagcgacagggtttcaccatgttgaccaggctggtcttgaactcctgatctcaggtgatccacccactttggcctcccaaattgggtagcatttttctagaatattgacaccttaagctttcttatgatactcacttttttctttcctacgctgttatgcccagtgggagaaggttgcttctcttaatagttctcagtaaatgctgattaaataaactgtagaagggtaaatagttaacaagattctgaatttggacttgtgatttttgaggcaaaaataataggttgaaagacatgttttttggatcaacaggcttgtatggaggtagacatttataatcttagtcatactagtgagtgatggacattttattactgttttgcaaaggtatggacaaagtcttaagatctatgtcttctacttttaggcatgtaggtaaaaatgtcagtaacaatgcagaaagccagtttatctatttaaaaaatgaatatattggaagccttgaatatgaggctgagtaatgcaagcttttcccaggagaactgtgacttcttgaggcccaaagctgcactccggaattataagtcctgagacatagtctataaacaataagtaaatatcagtcctatagctcagtgttcaccactgatgacttctcacacataagcaatatcatgttaagcagatagatactcatagtcatccaatagtttgcagtgggaaaatagtttgctaaaaagcaagatgtcatatgtgttgttatatttttcacacatgttgagaaattatctctgttgaagatttcttgagttaaccttggggcattagcctttgctgcaaggtttgaaaaactcaatttttcccattcagtgtgatctattacaagctattctgcttcctgaatttttgagagtattgctagttattttattctcagttacctaagaagggtcatatgagggaatgttttgattatcctaaattcgtttctatggataacttcatatctttgttcagatctgatttcttccatagtcacttaaacttgagaattctatcctatcttccacaaaagctatcattgaaatagctgtgctttccacttaaaaagtgaaaaggttaatggtatggagatgaaactggaatccaatcctcataaacagtactgtcttttccatttttatgttgcctttttggtcacctagaccatacacaagagattttatttttctttttgtctgattgcttctaaacagatttctattacatctccaaatttcagtttctctcccactgttcactctaggataaagtggagttcttactttatttcaatagaagctagaaataggtaccttaatgaggcaactcttgattttatttcagaacttggtaaaacttcggcttttcatttcaaaaacaaaagtaagcctctgtgcttgctgatctgtgttccgaagacttattctccctgtgcacccactatttctactagctagaagtaaggcagaattcccgtagagtaattgtgtttcagttgtatttcagacaccacagacatgaaagcttcacagaaaaggttgcttcttcctcagtggagctcatttggtaatagatgccaggtgcatgactgatgctggtttgaaatggaggacccagtaatggctatatcgcttggtgaaatcgcatgagctcaccagaattagaatatgcccgtaggagtaaacataacttctcatttttgaaaaattcgtaacttctcacaacttttgttgttctcattgctattgatattgttttaataatattcatctctatcagtgcccagcaagaaaatatatgcaacaaatattagttgaatgaatgttttaatccacacagtaagagccataggatataaatatacatgatcaatattccactgcagaaaccactggatatcttaaaacattataaagttacgtgcagaaaactattgctgtgctttatgattttaaaagtaaggtgtatttataataaaatatttaaaaatactgagaaattttagaaattttaaaatagtgacccaagaataatctttagttttagtattaatttttacatatgtacttaaaaattactgttgttgttactattattacatttgtaaaatgcaattggagtatattcattactttaaggtaggagtggagaagtggtttacttgagaaaaatgacatctagttttgtactttttctcacgctaagaagtacgtagaaacaagcaatcaactgaataactttagtgtttatttttaaaagtgatatatatcccaacaacttgtaacttattctttaaataacagaatttaagaaaatgaacaatattagataatattacataatagttatgtctcacttttagtatttttgtctttctacatgtatgaattttataattaactattacaatttttagacttccaaactaattttcatgattttggttatctgtattggggtacaatttacatacaataaaattcaccaattttacatataaaatttgattagttttggaaaatgtgtggtatttgcccctggttttctgaaaatagaattaaaaacccatcaaatcttttatcccccttcatctcacttccagtagagatatacttcttacattttatacttataatgtcttacctatagaaactgatagaatagggcctttcacaatactaattatttcatttggtgtttacagccaagcagttttgctcctcagaggatcttaactgggaactaaccctcatctgtaactatagtttctcacaccatcaaactttacttaaaatgtgccagagcctagttaaatgtcaaagaagaggcctggtagcctttgtttggaaatagaagacagtatctactttgaagttattgtttctaaccaatagcatcctcggattttaacatttttgttttattttgtttcagtctcactgacaaaatacctttcccattttgtgccttaatttccggtttgaatagcaatatcttagctcaatctttaaaaataagcactgtttttgtcccttttactgactgtttgctttttttaaaaaaagtccaaattagtttcaagatcaaacttctatgtatatttagaatctagccttgaatatttcctaatttatactgaattccatttatgtatcattcttggattagattttctaatctggccatgtttttttctttcagacctgttactagctcactcttttctattcaaatcttatttctcatcctggcctatttcccaagtgcaaagacagcggggcttcctgtgtcttagggctgcccagagctgatgcatatcactcaattacggtattataaataatatttttagaagtatataataaaaatattaccaccttaacagcttaaacctgaatttgtaatcaggttagaattaatccatgaaaaactttgtgatatagagcattgtgtttttctatgcacaactttgttgaaattctagcacttgggaaatgatgtctactcaagatttacattggctaattcttctcatactaattatttttactatgttgattatttattgttttatattggttgatggtttttcttgaatgctcaaataagcagccattcttgataactattgcttatctcagatgtgaagtatataataacattttattactggttttggttattggaggttattttaactaggattttactcttagttcagtttttaattcagtctgaaaggtattattaccaggtaggggagaggtcaaataacgaacattattttccaatcattctggcaatctttaaaaatgtggttccctgagtatgtatgtagtcatgtaccacgtaacagtgtttcggtcagtgatggactacatatatgacagtggttcaatgagattttattaccatacttttactgtacctttttacatttaggtacaaaagtacttaccaagtgttacaattgcctgtagtatttagtacagtaacattcacagatttgtggtctaggagcaataggctagactgtatggctcaggtgtgtaatatgctataccatctagatttgtgtaagtgtactctatgatgtttgcacaatgacaacatagcctaacgatggacttctcagagtgtatcccggtccttcagcaatatataactatacatatgatactgggttgtgatcatttcccagttacaaacaaattagctatcaattttctccataatatcaaactcttatgtgattctaagtaagtaattggcagaaaggagaattcacattagtttactgaaaaaaacacagtgtagttttatgaaatcttgcctgttagtgatataccctattcgcttttgttgacaaaatgcaaattacttctttaatattactcttctccataacattctgatttgtttaaccttgtcatgtttctgttaaaccagttcaacagaaagggctcatccacttataaataatgcattatctttcaaaagccctagtaattttttgcttataatctctgggtagcttcagtaagtcaaaacatgacttcatattctaacttgtcaaacttttaagcatcaagcaatttttcctgcacttttaattaactgcacaaaatattatctgtaatgaatagatatgttaacaagttatgttagaacaggacaagactagcttttggctcagtggggtagaaaaaagtaaatatattcttattgctgttgttaggaggtagctatgttagaatgttgctatggaagagagatgctactgaattgggtgcagtgaggggaaaacatgggagttaaaacatgtgggttatacacctatgtatctaggataccatgcagaagaggttggaattagactgatggttaatcagtgggataaagggatgtgttttcagtccttgtcagatgaatttctactttatcctctggattattggcccttattcttctttcccttagaacttatcattcttcaaaattacaattatttctgtaatcatatcaaattatcagcttcttaatgatgtttcttacccactgtgttttagcatctaagatatggatgtgtagctaattgtcataatagctaactagcattcattgcacgttcatataatgtccagctctttgttaagggctgaaagctcattatctattttaggccccacaacactctgaagttggtattcttaggaattctgtgaatgagaaagctaagacttcaggaatttagtgataaatttaggtaaaagttagagcaggcccaggacctacgtctctctacagtgacatacatgccctgaactgctactccctctctttctcacattacctaggcagcttttattgtgctttgttatctttaaaatagcgaattaacacttgctatttcataagcttaaagatgcattgcctgtaatattggaagctgatatgcagctcaccacatatccaaaggccggtaataatgaacgtaaaatagggaagaaaagacagagtatactgggatggatcattatctctacatgttgatttattttaaaagttcctttcagtgtatattaacaccttggaatgtgtgcaagttacaccggtgacctttctgcatagaactccaatgagagaaaaggcaacccattgttagatgaaatgcttttcatttcaagcatgtaagcagtaccacacttggtggattaaagatcgattgatctcagcaagcaaagaacgttgttaaattgttcagtcctcctttctggctttctctttttgctaagaatggaaaaagagaaggccttggtctctgttgtctcagattcttgtacctagggctataattgctgcagataaaacccaagaacaattgggttgtggttttcaagtttaattacattagagctgcttcttttgccctatagtcacatttgcaatttgtgattaacatattagtgggaagaaagtaatgatagattgtagttaatgaagcattttctctatctgttgtttcttcaatgcctctttcccgctacaggataagatatttatgttaatttttatgcatgctgtagttaggtttctatatattatgtagggaaagttctgcattagctctaataaataaagtgttcagttttaaatcatggtctttgctctactttatttatttgtatttactctttttcattactgcaggaggaaacagactcagtgttttatttttataataaaatactcttactctaagaaagagttattatgcatcctaatactggtatgcaaacatcattaaagtttacacagcaatggtttttaataacatttggagatattttggctgatgcagtttttgtgctaatattttggcttcaagataagaaaaactggatttaatccttgctagaatgctgggaaaaactgatgttatttgtaaatgaagatttaaaagcatttaactaagcttcgttttaagatatacatgtagagccacatctttttttttactttggaattttaaaatatgatttatcttcctttgtcaggtagactccagagtttaaagtgaaatatatatatgtaatatatatataatatatatattacatatataatatatatatatatatatatatatatatatatatatatatatatataaaatatatacagaaggctgagaatcaaaccagtattgaagcattcttaccaatggcaactgggatagtgtttgagaatgagattgtggggtgtgtgtcgaggaaggaggtaagggtgtggattaaaagttttggaggtgagatgatagacaaggaagaaaattttattgttatatctttccttattgaaattgctcattagtttgaatccttccactgttgtctggactccccattaaaaaagaacatgatcactgagaaagtgtctaatttagatgtgcttttgatagcaaaataattataatagacaaatccttgaaaaggaatttccttgtcacatgacactgatatactacaaaacagttgtgccatggcagcttataatatttaagtttcctgattctaggtacaaagatctctctgtgaaagctggccaaatattcaagaatgtactgaaatattcaaaaggtgtacatttatgatctagaataattgataagagttgaataattggattgcttcactagggaaaggcagaaaatgtatgactgtagagttaacattcttgagattattaaggaaatgataaagataacaatggagaattcctttcagtgtactaaaagttagggaagcagtggaggcttttgctgaaatttgaaagagacaaatattgaggcaagtgaaaagtaatagtcgagtcatttgagatatgtgcattttactctgtcagttttattttatttttaattaattttttaaaatttcagtagcttgaggggtacaagtcgtgctgggttatgtggatgatcgtacagtggtcaagttttggcttttagtgtgcccaacaccaaaatagtgaacattgtattcaataggtaatttttcatccctcacctccctcctgaacttctttcctctgagtctctaatgttcattatactactatgtctgcctttgtgtacccatagcttagctcccatttataagtgagaatgtgcagtattggttttccattcttgagttacttcacttaggataatggcctccagttctactcaagttgcggcaaaagacattattccactcatttttatggctgagtagttttccataatgtttccgtggactcatttgtcagtacccaaatcagtagcattgctgtacaccaacaatgaccaagctgataatcaaagaactcaatcccttttacaatcgctacaaaaataaactaaaatacctagggacatacttgaccaaggaggtgagggatctctacaagaagaactacaaaacactgatgaaagaaatcatagactattcctttccatggaatgataaggaaatggtatttccattttatttatccacttatctattgataggcacttggattggttctatatctttgcaattgtgaattaggctgtgataaaaatacacgtgcaagtgtctttttggtataatgactatttttcctttgggtagatatttggtagtgagattgctggatcaaatggtagttctacttttagttctttgagaaatctccatactgttttctatagatgtttcactaacttatatttccaccagcagtaggtaagtgttccctttctacgacatctgcaccaacatttactgttttttaatttaaattttttttttcataatgaccattctggctggagtaaggtggtatcttgttgtggttttaatttgcatttccctgatgattagtgatgttgaacattttttttctgtgtttcttggccatttgtataacttcttttgagaaatatctgttcatatgattatctcaatagactcttctgagtctattcaataaaattcaataaaatccaacatctctttatgataaaaaccctcaacctggtcaggcgtggtggctcacacctgtaatcccagcactttgggaggccagcgtgggtggatcacttgaggtcaggagtttgagactagcctggccaacatagtgaaacgctatctctatttaaaaaaatataaaaattagccaggcctggttgggggggagcctgtaatcccagctactcgggaggctgaggtaggagaattgcttggacccaggaaacgaggttgcagtgagctgagatcatgccactgcactccatccttagtgacaaagcaagactgcctcaaaacaaaaagaaaagaaaagaaagaaaagaaacaaacaaccgtcaaccaactaggtatagaagaaacatacctcaaagtaataaaaaccacatatgacaaaggcacagccaatataatactgaatggggaaaagttgaaagcattcctcttaagaactggactaagacaaggatgctctctttccctacttctattcaacacagtactggaagtcctagacagagcaatcatgcaagagaaggaaataaaggacatccatattggaaaagaggaaattaaactatctctgtttgccagtgatatgatcttgtacccagaaaaccctaaagattcccccaaaacactcccggatttgatcagtgaattcagtaaaggctcgggttacaaaatctatgtgaagaaatcagtagcgctgctatgatacaatgaccaaactgagaataaaatcaagaactcaaccgcttttataataactggaaaaaaatgaaatacctaggaatatgcttaactaaggaggtgaatgatctccacaaggaaaactacaaaacgctgatgaaagctgacacaaacaaatggacaaacagacaacacaaacaatgggaaaagcatcccatgctcatgcattggaagaatcaatattgtgaaaatggccatactgtccaaagcaatctactttggacaaagattcagtgtgattcttatcaaaatgccaatgccatttttcacagaattagaaaaaacaagcctaaaattcataagaaaccaaaaaaaaaaaaaaaaaataggaagaaaagaaaagaaaagaaaagaaaaaagagcctaaatagccaaagcaattccaagaaaaagagcaaagctggaggcatcacattaactcatttccaattgtactaccagactatagtaaccaaaatagcatagtactggtataaaagtagacacgaagaccaatgaagcagaatagagaacccagacataaagccagatacttacaaccaattaattttcaacaaagcagacaaaaatatccactggggaaaggacaccctattcaatacttggttctgggaacactggatagccacaggtggaagaacaaaactagatccctatctctcaccatattcacattaacccaagatggattaaagacgtaaacctaagacctgaaaccttacaaattctagaataaaacctaggagaaacttttctggacattggcctaggcaaagaatttatgcctgagaccccaaaagcaaatgcaacaaaaataaacataagtaaatgggacctaattaactaaaaaacttctgcacagcaaaagaaataatcaaaagagtaaacagacaacctacagaatgggagaaaacgtttgcaaactatacatccaacaaaggactaatatctagaatctacaaggaattcaaacaaataaacaaggaaaagaggccaaataattttattaaaagcaggcaagtgatatgtaaattgtatttttaaaattataacaaaagagtgaaatctagtaaatgttatacctcttggtgtttaggagtgaagtgtactgaggtcttgaaatgcatccaaaattataagttagctttcaatgttcaagttaccttgaaatgtgtccaaaattaagatggattaattgacgggtggattaatggatgatagaggtatacatatgtggataaataggcaggtggatatgtgattaagcaaatataacaaaatattgattctagaatctaacactaggaacatggctgttcactgtgcacttctctcaactttcctttatatttgaacattttcataatgaaatgttctttaaaaaaggaaagctacctgagacaaggtgagaaaattcttaatgcctattcaggtaatactagctgaaaaattgaaaataaactttaagtggagatgattgtcttaatcccaaagtattgctgacacgggatttgttagcatgtctctaaggtgatgcaccatatattttggggaaaagcatttcattttccctgtaaatcatggtgcatcaataatcatgcacttgcaacaagattgtctctgacttctctaacactctagcattgcttatgaaggacattcttctatttggccaacaaagaatatttctgtcttatcttaaaacagagataaggcaaatcattttgacagtctctgaggcaaggtaatccctgctaatctactcatctttctacctcttacatacaaagaatgggctagagtttgtcatgggaccacaggaatcaggctttgtccctgagtttattatttttctgaggcagggtctcgctctgttgcccaggctggagtgcaatagtgtgatcacagctcactgcagcctcgacctcctagactcaagagcttctttcatctaagcctccagggtagctgggattacaggtatgtgccgccatgcctggccaattttttattttttgtagagacagagatctccctgtgtttcccaggctgatcttgagctcctgtgctcaagcaattctcctgccttgacctcccaaagtgctcagattactggtgtgagccatggcatcccacctctgcttcattctaacataccacttcttccctgtttcccggactaaatactcaaggtcattaatagaacattattaaatttgaagacataaaaattctaactttaagctttactaaccaacataacatattgaattttccccaccacaaatttccaatagctggtaaattaatggtgtgttttgtctttcatctttaaatattgaatgaagcacagttctgctagatactcatatcacaatacatgtcttcagaaacaatttatatgcccagtgtatcaatatttaatttatttacacatttttttcatcactacctttatttgaatgatggatgtgttgatgcctaagcccatttatcactaagaatgaaataactaccactggggaaacttttgggaattatatatccatgagcttttcagaactgatcttttgtgacgatggaatggtcactgaccagatccttattgtagactcattacttttgaacacattcatcaataccaaggctcgggtggctgctggatgtcacagatccatagcactgtgccaccacgtgctccctaaaaatctattacatggtttagactatgttttcccaagcttaaacctaggaaaattgattgcctttcccataagtttacataatcagagaaacccagaactggaaagtattttaagcattcattcaggtcaaacatttgtgttctaatagaactttcttaaaatatccaatacaggcaacagcaggtcttattctaaaatatttctggaaaaaaattattccatttagataatgccatgtatgtatccagtccttcactatgtgcagtggtaactagtctaattttaattactgctctttaagccagtattcagctaaacttcataggaatgaatcccttcagtaacatccttatagtagacttcatatatttgtaaagctacataactacatataaaaccaattatgttttttcctagtcatttttatttataatgcatagtctaaactcttttgattttattttagaacagcattatttaaactttcttgctaaatagtaccagagaagcctagaaactcaagaaaaactacttttgaaatattcttgggatctaaatttttgtctttaaaacatgccacataaccttttctcatgtctccatactgaatcaatgcttaccttaaaacaccatattttaacttatgcattagatagaacacttccacacatcaaatgttcaggtaaaatagattatctgtgaacagacttggaatttattctgctgcttgccaaatccttgccatgctgctgtttcctccaatgtggtatgtgtttaaatctggggagcatactctcagtacatcacaagtatagcctattattattgttgttgttattgatgatgctattggtttaccaaaaataatttcctgtgatactaagcacatggctatccaattgaaacacttaacttttactgaggatctgagcattgtcccatggcatattaggatgtgttactgctaaatacccttctgaagatggtgaccgaatccttgaaatgtgtctgttgtggcagtttgagagacaagtgaacgccaaggtcaggctatcactcagtgaagccaactggctggctgcccacgtttctcataacatttcatttattttgatggattcaccaaggtatgagccctggcactcaggtttggggcacagaaactttgatgtttataagcacattaaatggttccatctctagggtacagattcacattaaccaagggcacaaagactagcaagtaagccacagtgccaaaggataaattgataaagaaaagaaaaatggccttgcagctggcaggatgcgggtcagtgcggtcaggcccttctgtccctgttggcaggtatttcagaaaagctaaatgaacatccagaagttgctgagtgagtgaacatgaaatcaggaaagaaaaaatcagttttatgattaaggtatttagtagtatgaaccgaatgtttccttatccattcatttcttcatagagactcacatatcatggaaatcagagtgggcaagagttgggagggcaatgatggtatttacaccttccaattgttgcacagcttctatagatgtattcagttaaccgtgacgtaggcagtgcctttctctgtagtctgggaacagttctttttcttatgattcaactctgagaaggcagtgctttctttttttcactattacaccatcatgtggtgtaggtgagcttctggaaagggaagaataaaagaaattatgttaactgttcagaaactgtgtgatttagtaacatagagcttcgttacagtaatgtaccctgtaagtggaaagacaggcagtatgggtattacgaaatgatttttttttaatggaagagaatgatggagaaagagacaaaggaaagttatgttagagtcataaaccctgcatgatcctgtaaaaattcatgcttgatccctgcagcctgaatcaacatggacatcagtaaatctctactcttgccgaagaaacaaactaaggctataaagaagtactttgtttttgatactcattgtcttccctgacagccaagtcaaaagatggagataaacaatgagcgattttctaacatgaaaaacaagacaagaaatatctttcttataaaggaatccactcagtctgttagtgtatatactttgccagtcattcctacctgattcaatgaatatttattgattaaagatctagtcttgtgaaagagacacttgaaactggacaaacagatgtagtttgttaagtgctaccagagggataagccaaatgccatgagcagactagggagggatgccttgggagcctcattgaatcattctgaagaagtttgaaaggcagtcatggtgtgggtgggcatgcatttaactagtaggttgacctaggagggaaatatgcttctgcttttagagattaatgaatgtatttatcaaatgtgtattgaaattctaatgcatatcaggcttcgttaacactatggatacactgagcaaaagaaatgagattcagctcacgtacacaagtaggtaaatttttgttttttgtttttgtttttttttggattagcttttgtaaatttacatctagaagtactggtattgttttgtactctctctttcttttgttttttgctttttggggggaaggggacttccaaaatggtattatgacttttcttctttgaaaaagagttcttaaatttatcttcaaaaatctcttgaaaactagaacaaaatgaaaaatgactaggactgcattgttaaccttatcaattgtgactatcaatatggaatccttacacctatgtagtttatgaaggcaaagcctacagttagtttgagacaactattaagcctgaccaaattctcagaatgcttttatgatgctaataagtatcactacaaaatgaattgatgtttctcatgcagccaaagtggcaatgattttacaggagggagaggcatgaggttggttatctcttcctggcagatgggctgtccctccccaacccctcctcccgacacagacacaggttggtaggattttttctacctacaggttggtaggattctctgggagaatgaaaatatttttaaaaagcaaaacaaaggaaaactcttaatttatatttaaattacccataatcgaatgattcacgcaaaatgaacttttagagcaaacgtcttttcaaattgtatgagggatggcttatttttaactaacggtactgacaggacattctggggactgctgcagatactggctgctctattcacaaagactagggggaagaaaaggctgtcttcagtaatgaatggaaacactgactggctttgaggcgagtaattgccttactcacccacacaaaaatttcagccagaaaagtcctcctttaagcagagcacaaatgatgtgaaatgcatacttgcacagatatagtataacttaccttgagtttatttaattattcctggtccatgggatttttgaaaaattgccagaatactacttttctgcagatataaataaaaggtccaaatgttgcttaacttcttttttcctgaattgcatagtatatatgtgttagaaatggctaataaccgtcacagagtagttgagaagttaaaacacacacaaattcttaatatttctaattaaaagcagcataggaatattgattactacagtggaaatgtaatgtgttctttctttcctttttaaatgcctatatggtacttattaacacttttaatggcaaaagcaataaaaataattaaaagcacatttagttcctgttctgcctcatttcattaatttctgcttttttttcttttggagaaaaagttgtaaaattgatgtcttagctgtagctgcctctttatgatattagatttctgtatgtaaagaaggtattagaaaaattttctcctgcactcaaggaatctttaaacttaaaataaaaagtgattataccttctattttcaaggcagaataaaaatgttttacaatgaatagaattcttgattttcaaagaagtttattacatttgattttgtcagagttaataagtgataataaataaatgtgtggaaaaataaacttttgaactagatcaaatgtgtttgtttctatttcagtattggctttgatgcctaagaaagcaaaatatttatctactgaaagagcttatgtctttgtggcccccagcttttcctctggtgagccttaggaaaaatggcacttgctctggaggcagggaggaaactccagatcagacccaggtttctggcttgggaggtggtggtggtggtgaaggaagtgcagttggttaagataaggagatgaggtgaattgccaaattttcacccagatgctcggcggcctctaaaggtcggtggtgttaccaggcgcaaattagtaatgctggctttgaacttaccttgaagctgcagtgccacttgttcttttcatgcagtcgtatttcgccaatggctttttactattttcttaacctatgtttggcatcttacctgactcctgggcaattacaacctttaaccactagaaaaggaagtacattaaacacaccttgttcatcttgaagagagagcaggggaatgggggtttcctcagcctgggatgactttcttctgcctttcagatctaagctctttctgacctggatcttatttaactgggaaacggccaggatagatttgatctttagcgtttctaacaaacatcatcagggatctctctttcctgaatcctatcacatttagcatcttgcaccacagtgctgagtatttttaaaaatataattttctcttttgttcttctgatgtttaatacattattcatcttcccaaatagattctcatttatctgggtgcaataagttcatctagagtccttccttacctactttccttcctttcttctttcatgcattccttcttccctccattagtaataggctgactctatactaagacttcaaaaatgtgcatgttctttaagagtttacagatgttctaaaactgactgtttcagaggaactactttccttgactcaataatagttaatcctcaagaacgattatgtatagtttttttaattcttcaactttgtgagatgtggttataaaacttaaattgatatagatgaaacagtttataaatagttttcacttgcattatttcttggaaagctcgtaaatactgtatgcaagtatcccctccattttctatgtgagcagcatgagcctgtattatatctacgaagtaaatgagtgggggtaggttttgtgacatgctggctgcatcagataatgctgcatggcataagctgggcacacactgctgttcctgttttatgcctaggaagatgaaagccttatcttaaatcataaaagtaattattaatgggcagcccaggtgggcagaccaggctgccaagtttactattttctatcgctctacaatgaatattccacattaggtatagattatctgttgtcaagagagttttatatcacactttgatataaaattaagtgtaaaaagctattgagaatcaatatttgacattctaaaagtaacttcaagatgataaagaataaaattatactaagcccaaaaatagtttctgggtttgttatattcatctgtttaataaatataagtggatgcgtggtgcaccaagaacttagcttggcattgcaaatgcaatgagaagtaactatgttctctactctccttgtggacaagagtctagtctgttaactagaaactacttctagatgattgggctgcaaatatgatccttctgctatgttttgcctagaactttaggcagaactttagttctaggcagaatgtagcagaagattatatatgcagcctgctcatcccctgaaatcaagcttaaagatgatggtctgccttgttagtaatccgtagaggcttatcaatcccagaaattttgggctattgttccagtctgtagatcactgacattcttttagtgctctttcaaccacaatttatagttcccaggatgggtcaacaactgtactcctgggatgtcttttctctctgtgtttgagatgcagatagctagttatccgccagtcctcacaatgctgaaatgcatccctcaagattaaagattctattcctaactttaaggaataaatctgagcttagtgcttcagtccaaatattttgtgaatacttagtatgtgctttactaggtgttatggatacagaaatgagtgtgaaatagtctctgacctggtagaactcaatttagacttaaacataatttggaaaataacacgtatggaggaagattcataagcctgatcatgtgtgttaggcataactagttaggcttataattatgcttaaatggattagatcaaccgtgtatgtaacagagctagtaaatagataattagatattaaaatgcaggtgtactgattccgaagccactaactcgtaatgcatctaccaaattcctctgagtgtaagattgttcattttagcagtttcagaactgtgtcactccaggacttaatctgtatggtaggggttctccaatttgagtgtgcacaggaatcatctggagagcttggtacaacaaagattgctcagtccttccctccccaggaactcactaggtctgagctggggatgaataatttgcatttatataaactcaggggtgaagctgaccatattttgagtagcactgaccttggggactgtttcccagacttcagcacatagtagagccatctggagagcctgttaaaagtggctgttaggacttccctggccctggagattcagaagggctgtgatggggctgaataatttttattttcaacaagctttcagatgatgctgatcctactggtccatggactgcactgagctaaggcattgtctaaataggtagacagaagtaacctactaagaaactcaattttgaaaaatatgaaggcttgatcaaaatatgtactctccttagcatggagtcctttcatcagagaaatgggaaaaagtaaaagtaggaaactaaatggcatgaatctcatgggcaattttaagaagcagtaggcactctaaatagcaactgactttgatatgtatggaggatgttttacatatattgggagaagattgtctgtctgaataatgtaactgtagaaagacccttagctttgtgtctatttagaggtcaatttcagtttctatccctctttttaaaaatatcttgtccgtgtattctgttcctaacattaacatataaggttgatagaaaatatggataatataaaaagtggtattgaatgatatcactagaaatagtgttcatgtaaagaaaagatatgggccagcaccaagttctgggcaactccacaattttgagaaattggaagagtggctggcaaataacaaacaggaaagtatggtgtcacaggagccaagaaaatgttctcgtgggaggcttcagcagtgaaaggattggaatgctgataagaaatactgtaagatgatggaagaattggctgtctaacttggctccatggagatcacgatatttctcattggaatgttttgctcaaccctaattgtccttctttgcagaatgaaagtcttgtgggaaaatagagattaaaatataactaattctgtctataaattatatagacatatataagaaatatataaattcaatctataaaatagaactaatgtgtttgtgtgcatgcaacatttttccgtgaaatatagttttgcttctgtatttttctgttcttattcataccacacattattcattagcacagatttatattccattttgataactgatatccacagatattgttttcaaaattattattttatatgattatttttccatctaaattttaaaatcactttatcaattaagaaaaaagttttatttggattttcactggaattactttaaatttgcagattaatctaggaagaagggacatctttaccacattgaattttccttaacagggatttgaagattctctacatccttcaagtggtcctataaattctctaataacattttgtggttttccctctttgggcaataatactttctaaagacatttaatatattgttttgctattataaatgctgtttttatatgtttttattatagtactgttcattgacattaagtacatttgcgttgctgtgcaaccatcaccaccagccgtctctagaacttttttcatcttatcaaactgaaactgcataaccattaaaaagataacttcccattttttcctctcttcagcccctaacaactaccattctgccttctgtctctaagtatttgactactcgacgcacgtcgtttaagtggaatgatacagtatttgtccgtttgtgactggctttattccccttaacacagtgtttttaaagttcatctatgttgtagcaactgtcgggatttccttcattttcaaagctgcataatactcatacatacacacacaggcatacacacaacattttgttattcttttcatttaccaatgatcatctgggttgtttccaccttttggctattgtaaataatgcttctgtgaacagaggtgtacaaatatctgtttgcatcactgctttcaattgttttgggtatataaccagaagtggaattactattgattattaatgataatcctgttttactgttttgttagatatatcacaatatgaattcccagctacaattttggggtcattttaaatactctcagttttctcatgtaccattttcttgattttctttagtttgtcattacttttctttagctctcagagtgtatttaaggcagttgttttaaagtctttctctagtaaatctgaagccttgtttctttaaggttggtttccagagatttattttgatcttttgaaagggctggatttccctgtttctttatatgccttgtgatcttttgttgaaaattgggtgtctgaaaaatcagacacttcttccagtcactgtagactgtgtggaggaagatgttctctaaatagcccggtatgaaagtttaagattttctcaggcattttctaggtctgtgtcttccctgggcctgtgtgtgtggtgttctctcccaatttccccatagacggggctgcttttatttatttatttattttgaaggctgctttgaaatgttttattatccgtccctaagagtttcacccctgcttcttcgtgaaatcttggctgttcctctgtactactcttgccttaacaaacatcttgcccccagtttctgcatgtcagcatactcttgcagttttcacaaactatgttacccatcacagttttgcatggcttccaaactgagattcaaactatatattcattttcgtctgagagctccaattgaggcaagacagaaaccagtccctcaggcagcccacagacaggccagaactttgcaaaataagttccactgccctccttccttcctgagagaaaaatactggaaagtgggctactttttttttttttttttttaactgcactcactgttccaaggtggcgcaagcacaagcaataatgccgtgaaatgtcctacctttttcactgtggctttttcttgatggggcattcacttggttggaaagcagtgaatttggctggttaccagagctcccaaaaagctgttttagtgagtcgctagtagtttacttgatgatcctgtggaggaatgaggacctggagctttctaatctgccatctttctgatatcaaatctgtttgtttgtattttgtcttttttagtagctttattgtagtttttaaccctaaatgtgtccagaatcacagttgcttagtcctgtcttagacctctaaatcgtgatgctaaaagtgtaaaactaacaccacacaatatattaaggatagctgtcatacttattttgtttctaatttactgttaattcatctaggagtgtgtatgagttcgttttgacattactataaataactatctgacactaggtaatttatgaagaaaagagtttaattgactcccagttccacaggcttaacaggaagtatgactggacggcctcagaaaacttaccgtcatggtggaaggcaaaggggaagcaaatacatgttaccatggcggagcaggagagagagtgagtgaagggggaagtgccacacgcttttaaaccatcacgtcttgtgagaactcactcactatcatgagaagagcaagagggaaatctgccccccgtcatccaccaggccccttctccagttgatcccactaggccccttctccaccatgatattttggtagggccacaaatccaaaccatatccaagtgtgcaccaataatcgtaattattggggagtgataaatgtgaattgcaactcatataattgcgagttcttttataaacaaattaattgtaaaaaaacaaacccaagcttaggcaacatagcaagaccccatctctacacaaaatatatagaaaaaaagtagccaggtatagtggtacatttctgtggtcccagctacttgggaggctgaggtgggaggatcacatgagcccaggaggttgatactacagtgagccatgattgtgccagagcaggaccctatctcaaaaacaaaaacaagaaaaacaatcccggaacaaaataaataaaacgaacaaaaaagagcaacaaaagacacttgcttggcatttctaacaagcttccagctgatgttgatgcctttgtaccatagctcagattccagtatgatttagcatatttaaccttatgtaggtcaacagcataaacctataaagagtataattttgaaaaatgtgtaacttgtaataagttataaaaaaattactttactcagcatagagtcctctaatcatagaagaaggataaatgaggaaactgtgaatggcatgagagcaatgagcaattttaagaagcagtaggcggagtaagtattaagtgcaacttaaatataagaaataatctctatgattatattttctttattggtattcttaactgatgtcttgtaggaaaccatgactgtttctcctaatactagacaatagtccataatgtttgttatttatactaaactcttacattcaattgactaaagttgtctttagtataattacatttatttctttaaattgaatttgaattttctttttgtggtatttttttcagacatactattcagatgacacgaacttaataaaaatttagaatttttttctgccttcaatatgttataaaatattttaaatagtgcaaaagttatttgtttcttggaggcaaaaatcagattttgccttcttcttttggaaactccttgaaagttatctcagttccttttatgcttattaatctaatatagcttgtaaatgttgtcaattattttttccagaaggaaaagaaatgcacattttgtggacatttccaaatacctacatgtgtatttttatacacattctctacttttaaaaaaactcctctgattcctttttcattctagattttgtatagttacataatcccagcatatccagcaccttttttataggatgttgattgaatgtgcatagtgaatgttttatatcaatataagaaaattaataatttttttctttatttcccatagcaannnnnnnnnnnnnnnnnnnnnnnnnnnncccagcttcatcttgtgtggtatcccaaaccttaacacactccagtacattttgttaaatggtaaatggtattatttaaggaaatttaaattgaatttctatatctcaaggcttttcaagccagagctggctaaacatttcttaggtgtgttgtaagagcatgtttctttaagatggagtttattccaggtatcttttaaagttttaactcttaaatgctgtttctttaatatcatgagacaatatagaaactcttaaaatattttaacttcctttaggatattttcagattattcagcataaatgtctttgaactatttcaaacctttccatatttgacattacttaccgttgaaaatataaacaccatcagtaaaataaaataactaaaagacaattcaaacttttgagctatttaacagaacgtgaactgatggaagaggagaccccattttttttttaattttgaggaactttattgaacttctttgagaaaacattaagattctatgtgaagatgtattgaagcaagtcaatatagggaagggataaaagaaagtgagtaaataagcttttgagtgattggtgtgattgggttaagaatgacgctaagaacgaacgtaaacagtgttcacactctagggctaaaaacccaagtacatcttttcacacggaaatacagatatttttaagaaccttccttgtgcttcttagaaagtagacaggtggttggagaaaatctatttttgttaaaacacacccacattcaatctagatgtataatttcaatatctcaatgatttttccttgtattttctctaaatgtcatgcttttcagactatttcaatatagatggattatatttcttttcagaatacatatggcagataaatacattgacgttttccaaaggaaagtacaaatggaatactatttcttaaaaaaacaaattttggtatcctttacttccttatgaagaaaagcaaatccgctggttaagattttttctttattttgccaaataaaatggtgtattacccttgcatttttcctacttattattcccagcatttttctccttgcacctaaacaaataaaaaatgaatttggacttagataaattatctttatagtggtaagccttgtctggtaaactaaactgttccctgaaggatgatgagtaatttgttgctggtagatgtaatgtaaatagttaggttacagactcagtttagtttggactatagcactaacgtgtctctaggcaatcacaatgtttaatatgatctgacgttgaacacaagcgtttcaactgatgcatccatccaccggggggctcatttacaaaagtagcaccatctatggatcatttaatgtttgcccctaagtttctagaccccctccttgtgatatcataatctaacatgcactttgttctgtgaccaaagcatccagatgaccatgttgcaagttcctaacatgttccttgtctaaggctgctgcccaggatcatacctgttctgttggtctggcatgtgcaattgattgctttcagatgttgggtggtagaaagccatcaaaaacaaagtcaatcaggatcactttcaccaccacttaattaactggctaattactttctaagcacctattaagagaacaagagattgttaactgacgtaaggaatctaaaattgtctaaggctgggtgtagtggcttatggttttaatcccagagctttgggagactgacacaggaggattgcttgaggccaggagtttgagatcagcctgggcaacatagaagacctcgtctttacaaaaaataattttaaaaaattaactgtgtgtgatggcactatgcctgtcatcctagctactcagaaggcataggcaggaagatgacttgagcccaggagtttgaggtttcagtgagctatgattgtgccatgggactccagcctgggtgacagagcaagaccctctctctaacaacatttttttaaattaaaaaaaaaataaaattttctaagatgtgattcttacattaaggagttaataactttaaacccaacagggatatgagggatctttatacatggttttaagcaacaccaacactaccattcaccatcatcattatgacgatgatgatgtcattcattcatgacataatgaatgatgagaaagagtacaagtatattgagggagaacattccaaacagttcacttagtgtaaactttcttatcatatacttaggtaagagttttttttatgagttattttattttaatccttccaacatttaaaaataattgtcattattattccagttgttcaggtaaaaattttgaggctcagaataatttagaagtgtgtttgcagtctcctagctctcaagtagcggagttggattcaaacttactggtacagtgtattttaggcacttttctttccagagaaaggaaagtcatatctggcttgcataactaggagaaattcccaagagaagagacatttgagcaggatgttgaatgactgacagtgtctataactggatgcatatgaaaggggttggatggaacagaattaggaatggaatggtgatgtgaaggttgaagcatctgaggcaaacgtaaggaaatggtaatcagagcagcatgaaatacaagattctttctcaaaagcagattgtgctggctggggaaacgggagcgtggatacagataattattcttctagactgacacatttgtgtttgattctttagccagtgtagggatgttaaagaactttggagaaaaaaagtaacgtaagtaacaccatgctttagaaatgtaatggtaatagaatataaggtggatggaaaggggagaattatattacattcattaagtcagcagttctcaaatagggacttgtatatgccttgagcattgatgagtcatttcagaggaaccacacattcttatgtgcatcactttatgaacagaaaaatatgtctcgctcaaatttgttttaccactttttaaatggtggacttccgtagtcagctgtgacttggaaaatatacatttatttgcaaacattactgacttcaggatagcattactgaattccacatattactgtgaattttcccaaataaaaagtattgatgtacagttatgtatgggtccaaataacttattgatttattgattctttaatgtacttgttctagaaatatttatctttacaagtggcattatagtggttaagtgtgatctttataatcagattttatgaactagaactccagctctcctacttattagtgataaaaggatatgttactaatctcttcaaatcccgttttcttatctgcaaatttgtgaagatgacactaatcttaccagattattttgaggattatgtgagattgcaaatctaaaatatttcaataccagacacataataatatatataagctattattactctttgttagactatgtctggtagacattacatggttttatcatattcacaaactgaaaaacacagtcaaaagtcatttctcaaatggtttgtcatgagttggagtgacagcatatcaagatcataatcagtaaatttcagtttataattttttcttgattctcttactgaattgaaaagtcagttataattgctacatttctattctttttcctgttcttacattgtgaaacaataatatgtgcttgcttctgttagagttaataaataggaaagtatttatggttcttggcccagatacccattcgctgttggttactgccctttttttcactgtctcagttcttgagatgagtatttcccaactttcagaccactgtaggttttgatttacagcagcagcctctctcgttctgtcactctaccttctgagtagccttgaagtagggcatcattatagagaatcagcaatcatcacagcacacacattctaacaaagaaactcacctagaaacttgcaggaacgttgcattccagataagggtttatggtcacaaggcaactattgactgtctttatatcacttctctaaagctgataatttgggggacccactgtattgatttacgtggaaaatatgaatgagaatcctaaagtgcaagaggaatagaagtgttggataataagcattatttgaaaaagaggtgtggagcaagtcatttaagaaaaagtggaattgatctctcctggatttggtttatcagaatgaaagactaacttagagcgatttatctgagaagggaaacaacaaacaacaaaatgcctcctatgcatggtttcttcttgtatttatttagagtctagttctttaaatctgccgggtttatggcacaattcaataccaaaataactatatgaatattgacatcaatgttttaatctgtgagtcacaggaactcatgtacaaatttattaaatgttttctattctgtttatatttgttgacaacaaagcggctctacggcttctggtgtgatttgtgcacatgtagtgagctggatatcttcatattttgtttcatttatcaccaaatctgttagctatttctaaataaagaggctgtattgagaaaggatgaaaagcagttgggaaatggagtaggaagaaaaaaatgagaagctcagtgttttataaactgtattgcaaaaaaagctgactttcatttcaaatcattgtggtctgtgctttgctttggtgaattatgcccacacatatctagtcaacacaggagagcacagatcattggaggaatgaatagctttaccacatgcatcgtgagagatgtacaagtttattttccccatcaaccatacctttttccaatatcatgcatgttgcccagcaagacagtgtcattaaccactggtatagaaggactcatttaatttagttaactaaatcctgttttttttttttttttttttatgagtggtgggagaactgtttaaaaaagacctgtttggttaacaaatgtgcgctgctctgcagtgagggacattttgaatgattttcccatttctagtctttgccccatccagttagaaagtagcccgtagtgcttcaagaacatttacatttacatctttattgtaggttccattgtagcaagaatacatgtaaatggactcgctctatttcaataattattttgcagagtattttggctatcatcctggtgtttatagtcaatgcatttttacaccatctacattttggacagcaagcataaaacgctgctggtttatctcacagagagagcagattgtcccccaaaagatagccatttataatatgtgcacttttgaataattaaatgaactactgaagaggaaatggattctaatcagctttcaaactgtgattgtgccatgcactgaatcattcctttatgaatacatttctcttggagcatgaataattacaaaacttttttttctatctcggtaggaactgggaagtaacagccctccacagagaaactggaagggaattgctattgctctgctggtgattttagttgtatgctcactcatcactatgtcagtcatcctcttaaccccaggtaatctgtctttattcctctcttatgatggatggtattgtggatgataatttcacattcaaatgccttaagagggtagcaatatgtggtatcttagggcacattagcatgggttggaatttggaaaaaaagcataatcagacattttgcaaatggcacagtaattctgcagttcaaatatcatgcaggatattttggggaagctgaaaatgtaaaatatgtaagttgagaatgccaaggagatttttggtctccattgccacttacagacttactatgtgttagtttgataaatgcagaagacatttgacttttattgtgggttgaagatgagggagtggcatctggaagtttctatatatagatgataacccaactgtatggaaatggaaagacaggatttgatggaaaaagatcagatcgaaagagagtgatctaagcctctaaatttggacacctatttcttgtgtcttcttttcctttctttcctaaagtttttacattctaagtttctaccctatctaaagaaactttgcaaattgcccctgcaatgatttttggactgtgttcttcagattaaagagtttaatactaatatggaaattatcattgtgcttctttctggggactatttcaatacccaggagattcattactctttagtaggtactaataaggaaggcagagataaagggatcacttttaaactccttcagttgtcttccagatacatttagcagttgctgcaacccacccacccaactgtttttctcaaagaccaaacacccacatatgacacagtgttatgaaaaatagtcatttctgggataggattgaatgaatccaaaaatcaactgatatttttaaattatagcctgttgttgaatgctatttatttccacttcaggtttgtcttagttttgttattttatgagccccttaaacacattgaacttatttcctgatgtacaaaatatgattaacaataactgtttttcagagtcatttagtcaaataattttggtgactaattatacaaatggcagtatcaattgttccagtgagacacttcgtgagatataccatctttgaaaaatactgacattgaaataaataaactgccaaaaatgcagtttttagatgttagttaacatgtggagaggttgagaaagaaattaagggagctactagggaggaaggaggagagaaaggtaattggaaaggaagaaagaaaaaattccctggtaaaagttggcttatccggcattctccccaggaaccttttcttaactgcctcatttgtacatctgcagtacaatgtcattgagcaatgtgatggctctaagttgctgcataatgccaagaatcattgttacaggaagatgagtttcagcatggtgtttcacttaaacacaagaagtttaacataattataaaaaaagaatgagtcgacattgctgccttctattgatggctattagccagatggaggtattcatgtcataatccctgtgtatttctcttgaactctttttctttcatcctggttctagcatccttggcccagtgattcactttctcaggttttcttgttactcattgaggccatagtgatattttggtgtccttgagagtttgatacaacaaagaccacatagagtgaggcactcactaagttaaacttctgctcaacccttttcaatttttcccagtataaaaccacagtgatgaaccataattgagttcattttgtcctgcacttattcatttgttaaagcaagaacaagcgtgacatacctgagtttgagttctgcctctgtaatacagtagttttgtgcaatttggcaagttatttaaccttctctctcactttactcatctgcatgatgggtataatatttagttccaacattgcagtgttattatggaggtaaaatgagataatgtagttcaagagtttatttagcatgctgcctagcactgctgctgctattcctttgatgattgctattattcagtacttattgaccaccagaaaccatgacaagcagtgttatataaagaatgttccccagaaaaggtataaaacctctcaggaatatacatcttctgtgacttcaattttagttatgacaaacggaaagggacaaaatatttaacctgaagttagtctcctggggtcaaattattcatgcattcattcatcccataggtaattgtggagttctcaccacattctaggtgctgttgtagttggccctgcactttcgctattttataactttcacctccaatcccgttacacaaatacaaacatttagaaaatacacatatttagaacaccacagccccccaactcagacttaatttcatatgatattaatcatataaatagaagtggcatttatttatttatttatgttttgttttaagatggggtctcgctctgttgctcaggctggactgcagtggtgcaatcatggctcactgcagtcttgaacttccgggctcaagcgatcctcccacctcagcctcctgagtagctgggaccaccatgcctggttatgttttattcttattgttatagagatagggtctctctgtgttgtccaggctggtctcgaactcctggtctcaagcagttctcttgcctaggcctcccaaagtgctgggattacaatcataagccaccacacccagcccacaattattatttagatttacagtttaccaagtgcatttcacatactacatgttcaaatgtctttggatttcactattattattggtagggacattataaaataaaaaagaaaataataatgctggagtggaaaaggtattgctgtaggaagcagacaccctactttatacagagagtgttctatactttctgcaaactcaatgccctcaagtgcctagaagattatgtaaattgatcaagtgggcaagtataacaactagtggttagaaatttgagttgtgacccagcaaaatggcagtgtagtcgcatggcctttacggtgggctcaacccaaacatgtcagagtaatacataaggccagaagactaatagtttgcagctcaagacttgagtcttcagcctggaagaacttttagaaatgatctagtcttgcctctctcatcagacaggaagaatatctgagtttgtttaacttttggggtgagaacaagaatatccatcaaggccatgtacactcttgattttgcgtgtgtctggctgtgtacgtctgtggtcagcctgcagtgctccaactgcaccaagcctttctcttctaaccctcaggcttgagttctctcagctgtgctaaaacagagccataaagaaaacctccagctggaaattaaacatgcagcatcatccctctgatcttccctctgtccaccaatatgttctcaaggcctagctttctaagtaaaaccagtcaagcaggtggaaactttcaaccaagtagaggaatctatgtcaggaggggaagcttctgactgtggaaattcagcaagacactgggccttttaggacaaggcctgcctctagaacaactcttccaataagagtggcagtcaggccggacgcgatggctcacacctataatcccagcactttgggaggccgaggtgggaggatcacgaggtctggagttcgagaccatcctggccaacatggtgaaaccccatatctactaaaaatacaaaaaatgagccgggcatggtggcatgcacctgtagtcccagctactcgggaggctgaggcaggagaattgcttgaacctgggagtcagaggttgcagtgagcccagatcgcaccactgcacttcagcctggtgacagaacgagactctgtctcaaaaaataaaaaagagtggcagtcataaattcatatagcttttataattatacaaccctgggctagtcactaacttctatggcttcagtgtttcattgaagaaaaggacatctttggtttgctaaaatgtgaggtgatctcttgaagtgtattataactctaatgtctattatctaatatattaataacagctaccaatgataataatgccttgtttagtgacaaatatagcaacagatgaaatatggtgggctctttcactaagatttttctaccatgaaaatatatttagtgggttggttttgaagatgaaagcatacaaaaagttatttagtcaaagaaatgttttagaaactgttttactcaaaatagcacacaatttgcaggtaagtctaaggaatgcaagcctataaccagagaaacacatgttcactgtaatttcggtttgattgcaaattttattacagaagtagtttgacacatgtgccttaatttctaaaattatcagactcttccttgccttgtgaagagaagtcctaactatttttgaagaataggctattcaagtatttcattttataagtatttctgaaaggaacaaattattcattccatttttttaattacagggtggacttattcagatgcattgatgaagcctacattattttttctattgagtttgtttaaagagaaggagtttacccacgtttattttgagaatatgttaactataagatcaataattatactctacaaatatatgagtgtacattaatgcttaaagttgtagaaatcagtctagtaaaggtatgcatctactttgcaatcttgtttttacatttaatatgtagaatgagaaggaatatacttgggagaacattttgtgcagaatagaattaccaattttggcctgttttaagaacaaaggtgcatattttatgagtcagaatgcagttgatacaggatagtcatcaggctctttaatccatctgccatactgaaatagccacctgcgaactgtgtatactccacagttcttcagcaacaatggcctgttgccctttgactgtgtctgtaatcggtcaatgccgagacagagtcatcacactgattatctgtcatgctgactaagggtaaaacgggaaagcaccaaaatgtggtcttcattgttagctctagctcctgtttcttttggaaacttcccaattaccctctgttacaatagtgggattcattcctttagtacactttttaggtgtgcacagtagatggtctttgcaggtttatcagaatataaacataaccaagcattgatgtgggaatcatgagagctctgcttgatctcagttaaacaagaatttaatggtaatttttcagttccgcaatagagatgtctttattttcacttctagaagtgtctctaagattaagaattttaaactaatttcataggccatgttgggtaataacttacccaggtcgatactgccacagtgatgttgatgattagataagtctttaatatcagatatgtgttacatccatgaagctatgctcaattagttcatttgagtcaaaacagagaattaagcaagtgaaggaaactagagaaacataggcagccctattcagaaaaatcaacaaaagaaaccaaaaactagaagacagcatttaaggtattatgccttttttacatcaacctaaatgtacagtgcacacaatcaactcatttaaccctcataacacaccagtttaaaggaagtagagcagttttctacataacacagctagggccaatagatttggatgacttcagcagctagtttgtggagaaagtatagtagatagagtgactaaattgaccttggtattcgactgacttggattcatctcctagccttactatgtgcccacaaatatgatgttgaggtaaagaatcctctctgttcctattgttaagacaacagattaaaaaaaaaaagatttgaccctttgaaagagggctttaaaaatattcatatgcctgcacacacacacatgcacacacacacatacacacacacacacacacatacatctatatgtaaaactcatttcctagaaagcatttaataaaattaaggactttattggactgatgacagctgatctgttattgttatgcaaaaactcaaagtgaattcattctagttactattttgctctaacaaaatgacagctcctggttatagttagttaaaatgttatgttgtactatattgcagacaatatcttggcatctgtaatttattaggtgtcatttaagcacctgacctgtgttttaaaatgtcaaagcaatgattaaactatccccattatgcattatgaggggaaaataatgttttaccagatttttagatttgtactacttgtaaacatcggcatcaatcaagatgcaaattgtttattttgttgaattaaagcaggagatgtgctgtattgataggcatagtctaatgtgtctctgcttgtttttttcaacaacagcacagattgaacatggatttccatgtagcattacccaggcataatcaggctgcagagaaaacaatgacagattctaacagtttccccctggataatatggattgttgttgcttttttaaatagatttatctctgatgttgaataaaaaataatttcctctggcattaacggaataaaaacagttacttttttgtctttcctttatagtttcatttctatatttaagccatatgtgattcccttagttactctcataatgttagagtgtccagtcagataaatgatgaatttggtttacattataatgtgtttagttttacaagagtcagaagagaacctataaacatttatgtatatctttttcttgccagatgttgtactaagtgctttacatgtactattttttctcacatcactaatattgcatagatactattcatttatttacattctagagtattcatctgagtcttacaagttgaagtaaattgactaatttcacacaactagaaggcagagatgctcgatcactctctcaggcacttttagctttgacatgtgtcataatccttgtaatataagttaagacatattcttgtgcccatggatgataggggcaaaaaaatattttagaaaaataaatttcccctttattctttcctatgatttttgtaattagtaaactaattctatgtatttctaaaagggaaggcatagcagagaaagaattcagctgaggattgaggtgtaaaaatttggacaaggggcagaaagggaggcagtgacagaagtgggaagttgaaaatcgtaagtgtaaattctgtatgtatttttatttctggtttcataatttttcagaacttcaaatacccatgataaaatataagttcatattttccatcctaaaccacattatataaaattgtgtgtcattatacaactttaatattttgtcatatattttatttcttcttcctaatagaaatttgatttagaaatgtgatattctggcctctaatgtatgattagatagtctggtctctgagaagtcaggtttccataaaagcgagagttatggtggggtttggtggctcatgcctgtaatcccagcacttgaggaggccaaggcaggaggatcacttgagcctaggaattcaaaaccatcctgggccacatagtgagaccccatcgcaactaaaagttttttaaaacaattagccaggtttgttggcacatgctactcaggaggcaggaggattgcttgagacggagaagttgaggctgtagtgagccatgatcatgccactgcactccaagctgggcaagagagcatgactctgtccaaaacagtcttccatctagttccaaaacatattcatcaccccaaaaggaaactctacccattaagcagttgctcctcatatcccacctcagttgctcctcatatcccacctccctcatcccctggcaatcaccaatctacttctgttctctgaagatctactttttctagatatttcacataaatggaatcaaataacatgtgacctttagtgtctaacatctttcactttgcatgttttagaagttcatccaccaagtcacttgtaacagtgcttcatccctttttatggctcatagcaatccattgtatgcatattccagagattgtgctactgtgaacctgtgtgtatttgtttgagtccatgtttttagtgtttggggttatatacctaggaatggaattgctagatcctatggtaatttctgtgtttaaatgtctgaagaactatttgccacagcagctgaaccatcttacattcccaacagaaatattcatgtgttccagtttctccaaattcttagaaacacttgttcttttcttttttttttttttcaattatgggcattcaagagatatgaagtagtatctcatttggttttaatttgcatttccctaataattaactatgttgactgagtatcttcttatgtgtctattggccatttatatatcttctttaaagatagatctatttaagcctgttgcccattttaagggacttgctggttttactgatagtgagttgtaggagttctttattccggatattaatctcttgtcagaaacatattttcatatactttcttctataatgtaggttgtctctttactttcataatagtttcatttggtgcacaaagttcttcattcacctgttctttcattgcttgtgcttctgatgtcttatttaagaatacactgctgaatccaaggtcacaaagatctgtcttttgttttttttaaatgagtttatggttttagtttatctacatgggtcattgattcattttgagttaattttttttatggtgtgagttagggagtctagctttaatttttgcatgtgaataaccatttcacccagcaccatttattgaagagaccattctttcccaattattatagtgtgaaccttccttggttatagatatatgagttatttctgggcttataattttacttcattcatctctatatctgtcctcatgctggtactgcattgtttggattactgcacctttgtggaatgtttgaaatctggaagtgtgactattacactttaaaaatatatatattgctttgctatgaagagcccatcacagttccatataaatttgagaattagcttttttatttctgcaagaaagccagttgggattttaatagtaattgcattgagtctgtatttgctttaggtaatattaccatcttagaaatattagtgttccaactcataaatatggaatgtcttttcattctggaaataatttaaataaaacaaaaatcaacattttgtagtttatagtgtaaaagtttttcatacttggttaaattcatttctatttagtttattcttctttatgatactgtaaatagaaccttaatattcttttctgattaatcattgttggtatacagaaacatgactgattgtttagtgttgaccttgtactcttcaactttgttgaaatcatctattagctttagtagcttattgtagattatctgagattttctatgtatgaggatcatgtcatgtgtgaacagagatagttttacttcttcatgtccaaattgaccatcttttagttctttttcttgtctagttactctggctagaatttccagtacaatgctggataacaatggtaaaagtggatattctcgtcttattccatcataggtggaaagctttcagtctttattcattgagtagtcttagcttgtttagataaagattctttacattgttgagggagattctttttatttctagctcttaaaatatttttataaggagtgttggatattgtcaaatagattttatcaataaattgagatgatcatttgttttcctcccttttctactatatgttgtattacattgattttcttttgctgagccactcttatattcctggaataaaacccacttgttcatgatgtataagcctcttcatatgctgaagaactcagttttctaatatacctgaaggatttttgcatctgtatttataagagatattgatctgttggtttcttttcttgtgctatctttgtctaggtttcatatcaaaataatttttaacctcacagaatgagatagtaatcttttcttgtacagttttgggaggagtttgagaaagatgagtgttaattcttctaaatgttagaattcacaagtgaagtcatctggttctagcctttctattgttaggaaggtttttgattaatgattttgtaacttactcattataggtctgttcaggcattttatttcttcttgaataagtttggtagtttgcgtttttctagaaacttgtttacatcatataatgtcttagttcatttgtgctgctatagcaaaataccacagactgggtaatataaacaatagtaaattatttctcacagttctgcaagctggagaaagtccaagatcaaggttctagcaggactggtgtctggagagggctgctctctgcttccaagatgatacctttttgctgcactctccagagggaaggaacactgcattctcacatggcagaaggaacagaaggaaaagacagccttcccttcaatcctaagctcttttataagggtattaatttcattcgtaatggtagggccctaataattacctctcaaagttcacacttctcagtattattgctttggggattaaatttcaatatgaatttggaaggggaatataatcattcaaaccatagcatataatttgtatctgtattgtttgatacatatatgtttattattttgtctctttaatgaccatttttcaatatatagtatcacttcttctcataacaatttttgacttaaagtctaatttttctgatatgaggataacaaattctgctctttcttgattacagtttgcaaagaatatatttttccatcatttaccctcaatgcattgcatctttagaaagcaagtaagtgaattttaaaaatccattctgccattttcagccttttgaatggagaattacatttatttacatttaatttcttaaaatgaagtaattgtttcattgttccatttgttttctgtttgtccttttacgtgttttttttctttaagtccttcaatgctgctttcttttgtgtttatttttataatgcccttctttgatctcttctcatttcctctcgaattttttttcttatggttatgttggtcatcataattcatattttaaatttataacaatttagtttgaactaattttatcttatgttcaatcacatacacaaactgtttttatacagcttcacccttacaatattgtttttgtcacaaattacatctatatatattgtgtgaccattaatctagatttataattattattatacatttttcttttaaatcatgttaatataagaaatataaagatgagtcacaagccaaatatacaataagactgccttttctatctacctagggagttatcattactagagttttttgtttcttcatatagcttcaaattattgcctatatttttccacttcatgctgaagtctccctttgacatttttggagggcagttctacttattgcaaactccctcagctttcctcagcttttgtttatcagggaatatcttggtttctccttcatttgagtgacgattttgctatatatagaatttttggttgaaagctctgttcttggctgggagcagtggttcacacctgtaatcccagcactttgggaggctgaggtgggaggatcacctgaggccaggagtttgagaccagcctggccaacatggcaaaaccctgtctctgctaaaaatacaaaaaattagctgggtctggtggtgggagcctgtaatccccgctccttgggagcctgaggcaggagaatcacttgaacccaggaggcagaggctgcagtgagctaaggtggcgccattgcactccagcctgggcaacaagagtgaaaccccatctcaaaagaaagaaagaaaggaagctcttttctttaaaaatgttgttccaccttcttcttgtctctatatttattgctgagaaatctcctgttaaacttattgagaatcccttatatatatcaagagggttttctttcgctgcttgcaggatcctatctttgttcttatcttctgcgtattttattataatgtgtctcagaatgcatttttttagtgtttttttttttttttttgagtttgttgaacttcttgaacatatagttccatgtcctttgccaaatttggcaagttgttggccgtcatttgtttaaatactctttctgcccttttcctctctctcctcttgtgatttccattattttatgttgctatgtttgatgatgttttaaatgtgtcttaggctttgctcattttccttcactcttttttctttctgctttctgtaccagtaattttaattgatctattattattttcactggttctttcttctgcctgctcaaatctgctgttttattcttctactgagtttgtatgtaagttcttagacttttaagctccagaatttctgtgcatgtatgtgtttaatactttttatctctttattgatattttctacttttttcatacattgttattctggtttcctttagctctttattcatgatttccttcagctctgtgagcatatttaacacaattgatttaaagtcattctctattgagtaaaatgtctgtgcctccccagcagcagtttctattaacatctgtgaatggacttcactttcttatttctttggatgctttacaatttctgattgaaaagtgtacatcttgaatattacagtttggaactcttataatcaaatttttcttccttttctgggtgggcttttgtttcttgctgtaggctgtagctatttgtgttttctttggtagaatattttaaactatttttgaaaaatcactattattcaccatgtatgttctctgaagtctctgttctttaggttgtggttagctagggttttctgtttgattattctgttttccttaatattttggtttagaaatgttttcttgaatattaggaggcaaatgtggctatggtggggtgtggaggctaggagaaataaaaaacagagagggtaaaataccttttcaggttagctctgtgtttcacacttaaacacttagccagcccatttacaactctaccttaatctttacttcctgcctctcttattgtgataaacctggattccttattatagttgaagcccagcataaggtttatatctttaccacctacactgctttctactttattatatgattcataatagtttctattacaaactaagttctcaataaatgcaggcatgcattgtaatattgcaggtttagtttcagaacactgcagttaaacaactattccaataaagcaaatcatacaatttttttttggtttcccactgcatgtaaaagttatgtttatcgtatttgtagtttattaagtgtgcaatcgcattatgtattataaaaatgaacagaccttaaataaaaactgctttattgttaaaaaaattctatttgatgatctgagccttctgcaaatcataatctttttgtcagtagagggtctttccttgatgttgatgactgctaactgaacaagctagtggttgctgaaggtgggtgtggctgtgacagtttcttaaaataagagagaaataaagtttgccacattaactggcaattcctttcacaaaattttatccatagcatgcactgctgtttgagagcattttctccacaatagaccttctttcaaaatgggagtttcttctctcaaatcctacttctttatcaactaagtttatgtaatattcgaaatcctttgttgtcacgtcaacagtgtttacagcatgttagctaggagtagattccatgtcaagaaactgctcctttcacttcatccataagaaaaaactcctcgttcattcaagatttattttgagattgcagcagttcagtttcatcttcatgttccacttttaattcaaattctcttgctgcccctaccacatctgcagttatttcctgcactgaagtcttgaacctctcaaagttatcagtactgattggaatcagcttcttccaaactcctgttaatgttgatattttgaccttttcacataaatcacaaatgttcttaatggcatctagaaatgtgaattatttccagaagatttttaattcactttgcccagacccttcagaagaatcagtatctatggcagccttatcaaatgtaattcttaattaccaacattggaaaatcaaaattactccttgatccgtaggctgcagaatggatgttgtgttagcaggcatgaaaacaaccattaatattgatgtacatcttcatcagggctcttgggtaaccaggtgtattgtcaatgagcagtgatattttaaaaggaatatttttatgagtagtaagtctcagtagtggatttaaaatatttagtaaaccatgctgtatccaagtgttgtcagccaggctttgttgtttcatttataaagcacaagctgagtagctttagcatgattcttaagggccctagggttctgaggatagtaaatgagccttggcttccacagaatgtcaccagctgcattagcccctaataggagagtcagcctctcctttgaagctttgaaaccaggcattgacttttcctctctagctatgaaagtcctagatagatcaagaccatgctggctaacacgatgagaatccatctctactaaaaatacaaaaattaggcaggcagggtgtcacgtgcctatagtcccagctactcgggaggctgaggcaggagaatcacttgaacccaggaggtggaggttgcagtgagctgagatcgcaccattacactccagcctgggtgacagagcgacactccgtctcaaaaaaaggaaagttctagatagtatcttcttacaataaaaagctgttttgtctacattgaaaatctctcgtttagcatagccaccttcatcaacgatcctagctacatcttcttgataactggctgtagtttctacatgagcacttgctgcttcaccttgcactttgatattatggaaatagggtctttccttaaacctcatgaaccaatctctcttagtttcaaagttttcttctgtagccttctcatctctctcagccttcacagaattgaagagagttaggaccttactctagattaggctttggcttaagggaaaggtgtggctagtttgatcttctatccagaacacaaaaactttctttatatcaacaataagcctgttttgtttttctatcatttgtatgttcaatagattagcacttttaatttcccataagaactttttgtggctaactgttgggagcaagaggcttagctttcagcctacctaagcttttgatgtgccttcttcactaagcttaattgtttttagttttggatttaaagtgacagacatttgactcttcctttcgctggaatacttagaggctactgttgccctaatttcaatattgttatgtcttagggaataagggggcctgaagagagagagagagacaggggatcaattggttgatgtcacggttagaacacgcacaacattatgctcttatgtggtcatggttcatggctccccaagacaactacaatagtggcatcaaagatccctgatcacagatcaccgtaacagatataataataataaagtatgaaaaattgtgagaattaccgaagtttgacacagagacatgaagtgactgcatgctatcagaaaaatggtgtcaataggcttgcttgacaacaggctaccacaacccttcaagttgtaaaaaacaatgtctgcaaagtgtaattgagcaaagcacaataaaatgagtatgcttgtattgaccagtgacaaatttatctggttatccactcttgcaataaaaatgtcagagaattgtttagtgaaagttcttgataatgaagtaataaataataatacaatagaataaggttattaaagctgatgatattaccaaatagaaaagaaagtcaacatcttttgagacttgaataatatttattataaccctggcagtttgaaatgtggaaaaacataaacttgtaaaatacacaataaagtacgttcagtagaacttagtgtagtgtactctaacaaagtattgaggacccaaaaatgctttggggcatttgaattgcatatatcaccatttgtaaaattagacattgcaaataaattctgagatttcaaataaaatgtgtattaatttatttaagatgacaataataaaacaattacatataaatataaataacaaaatgaaaagttatgtttttcaaaacaaaaaaagcaaaataaatggtattgtttcacatttttacaaatgtatttaatgtctaactcagaggaagatggcagaattctcatatgtgctcctctgttaattcttttgcaatacattgttttggttgagatatatgcagaaattctgacctgataaagacacatagtcagaaatagaatatgtatgttaatagctatttcagatcattgtagaggttttttgctgttacttcctgaaaactagataagtgctagatgcttgaaggttaattgcagtgtaaaatctgaataatattttaatactctgctacattaaagtccattggtccatcttacatgttgaaagactcttacccacgtctacttctgtaatatgaattggtcatttgtaaaatattagttcattgagttatgcaggtcttccaaatgtcagtggagtttattatacagccatgcacattataatggcttttaggtcaatgacagacttcatatatattggtggtcccatttgattgtaattcagctgtaaagttcttatcccctagtgacacaaccgtagtaaggtcatagtagcatgattcattactctggtgtttttggtgatgctggcataagtaaacctactgtgttgcctgtcctgtaaaattatatcacatagaattacatatggtacataataataatgataatagactactacattactggattatgtatttaatatactacacttttattattttacagtgcattccttctacctattaaaacataagttaactgtataatagcctcacgaatgttcttcaggaggtattccagaagaaggcatggttatcataggagattttagccccatgcaccttatttaccctgaagaccttctagtggaataggatatgaaggtggaagacagtgatattgatgatactgaccctgtgtaggcctaggctaatatgtgtgtgtttatgtctttgttttttaaaaataaaaatattaaaatagacaaaggttatgcaataaggacataaagaaggaaaatatttgtgttcagttgtcaaatgtgtttttaagctaagtgttattagaaaagtgtcaatgatgaaaaacattgataaagtaaagcagttacaggaagctaaggttaatctactactaaagaaagaaaattttttaatgcatttaatgtagactgtgcagtgcttataaagtctacagtagtgtgcagtaatatcttaggcattcatattcactcaccactcacttactgactcactcagagtaacttccaatcctacaagctccattcttgaagtgccctatccaggtgtaccattctttttatcatttataatgttttttaactatatattttctatgtttagatacacaaatagttaccattatgtttcaattgcctgtgattttcagtgcactaacaggcagtacaggtttgcagcctagcagtaataggctgtatcttatagcatagatatgcagtagactttagcatctgggtttgtgtaagtacattctacgatgtctgcacaaccatgaagttgcctaatagcacattcctcagaacatatccctgtcatttagtgacatgtgattgtacagttgttaaaaatcatgatgaatttcactaatgatttcactaggaaaagctcactagagaattattgagaaatgatcaaacttaagatggagaatatcagttttctaaaattcattttcttgcttgaaggggctcgaatttttttgtttgtaacaaatacagccaattgtggattttgtgaagaaaaagtttacttcattttgaagaaaaacacctgtcagacacttaaatctgaataattgtagtttgttactcattccttccagtaaaaataatgttctatgagaaacaatgtggtgagtttagctcataactcaagcaactgaccatatgcttttccatgagataaccatcatatttcgtatgcactggtgttattttattttttgacatactgcaccacacagatattcaaaagatgttgagagtcaagatgtagtacaattaatattttttactacttctgaactgaaactgggtttatttttaaattgaggctatatggccataaagaatataatgacaattgtttgatgtcacagtgtcgacttatgaaagggtgcctggagttttatcaaccattgcttttgtatcacaagtgaaaatttcaacccattgacaaggacaataatgtcttcgtgttattatgaatacagttttgatttctgtgacccctgtcttcctgaagtccacaaccatacaccagaaacctctggtgtaggctaataaagacatggaataaaaatttggtcatggtaatgtgatagaatcaagcaacatatgtgaaggaggaacttaaatatgactttatagagccataacactttagggtaaaaggaggacatcatttcagggtgtatgtgtgtacacatgtgtatgtatcacagtgtgtaaatgctcttctccaaatgtggaaagcttacatacatttctcatatttagattctttactcatattcaggagatgttaatttgaaaaaggtctcagaaagaggtttgagaatcattagcattttgaatgattgactaatttggctaattagaactatgagtaaatcctaaagctcttgacttatgtaatcaatggatgataagtttgaggtaaaatttaataatagtccttcagaacctaaaggtacatttcttatttgatgagcactttgagtcactgccaaaaatgaaagagcctagtataagatataccagaaatttgagaatcctaagagatgcaagctagtttgcagctcatcatgtgtgtttgtatgggttttgtgtgtgtgcaagcatgtatgtgtagagcttcaaataaaattctatacaaagaatcaaacatgccaaagcagcatttttctggttgaagaggtctaatcacataacctctgtccttccctcatctcttctctatcctgaaagagttcactagagtccttagaacactgctggatatagtgtgatttagtccaactcttggtctttgcaaatgcaaaaaatgatgcataaataaatggagtgatctaaccaaagagatacctgctagcgaagggttgaattaggactaaaatatgaccttctaactctgatcactgtttgtgaagcatcattgcccatccccttttgagaacagagaagcagaggttagatttattacagtatgctgggcactgcagggaaggtgaaggcattgtaggtggtaaacttcttgcagtttatgcttttgttttatgtactcagtatgaatatcctaaatattatttctatatttgttgaaaaaagagcagagttttgtgagaaaacagaaagaagcagataataaattatatttcatttgtcagctgtcctcctcattctatttaatacaggcacagtttggtcttaatttagttacttaccctatgttgagttttaaaaatgtatttataattaaaatatggctttctgtatgaaagtcccattttggaaatatactcagataggaaagaacattcattggatgattgtctgacccaggaaataaattaaattaaggagtatgtattattaggctttgtaagatacagggataatctgagtcaaaagtagttcttgctttctttattttttattttatttaagttctagggtacatgtgcaaaacgtgcgggtttgttacatatgtatacatgtgccatgttggtgtgctgcacccattaactcatcatttacattaggtatatctcctaatgctatccctccccgctccccctacccaatgacaggccctggtgtgtgatgttccccttcctgtgtccaagcgttttcattgttcaattcccacctatgagtgagaacatgaggtgtttggttttttgtctttgcgacagtttgctgagaatgatggtttccagcttcttccatgtccctacaaaggatatgaactcatccttttttatggctgcatagtattccatggtgtatatgtaccacattttcttaatccagtctatcattgatggacatttgggttggttccaagtctttgctattgtgaatagtgctgcagtaaacatatgtgtgcattgtgtctttatagcagcatgatttataatcctttgggtatgtacccagtaatgggatcactgggtcaaatggtatttctagttctagatccttgaggaatcgccacactgtctgccataatggttgaactagtttgcagtcccaccaacagtgtaaaagtgttcctatttctccacatcctctccagcacctgttgtttcctgactttttaatgatcgccattctaactggtgtgagatggtatctcattgtggttttgatttgcatttctctgatggccagtgatgatgagcattttttcatgtgtcttttggctgcataaatgtcttcttttgagaagtgtctgttcatatcttttgcccactttttgttgggtttgtttttttcttgtaaatttgtttgagttcattgtagattctggatattagccctttgtcagatgagtagattgcaaaaattttctcccattctgtaggttgcctgttcactctgatggtagtttcttttgctgtgcagaagctctttagtttaattagatcccatttgtcaattgtggcttttgttgccattgcttttggtgttttagacatgaagtccttgcccatgcctatgtcctgaatggtattgcctaggttttcttctagggtttttatggttttaactctaacatttaagtctttaatccatcttgaattaatttttgtataaggtgtaaggaagggatccagtttcagctttctacatatggctagccagttttcccagcaccatttattaaatagggaatcctttccccattgcttgtttttctcgggtttgtcaaagatcagatagttgtagatgtgtggtactatttctgttctgttccattggtctatatctctgttttggtacgagtaccatgctgttttggttactgtagccttgtagtatagtttgaagtctggtagcatgatgcctccagctttgttcttttggcttaggattgtcttggcaatgtgggctcttttttggttccatatgaactttaaggtagttttttccaattctgtgaagaaagtcattggtaacttgatggggatggcattgaatctataaattaccttgggcagtatggccattttcacgatattgattcttcctatccatgggcatggaacgttcttccatttttttgtgtcctcttttatttcgttgagcagtggtttgtagttctccttgaagaggtccttcacatcccttgtaagttggattcctaggtattttattctctttgaagcaattgtgaatgggagttcactcatgatttggctctctgtctgttatttgtgtataagaatgcttgtgatttttgcacactgattttatatcctgagattttgctgaagttgcttatcagcttaaggagattttgggctgagacgatggggttttctaaatatacaatgatgtcatctgcaaacaaggacaatttgacttcctcttttcctaactgaataccctttatttcttcctcctgcctgattgccctggccagaacttccagcactatgttgaataggagtggtgaaagggggcatccccgtcttgtgccagttttcaaagggaatgctcccagtttttgcccattcagtatgatattggctgtgggtttgtcatagatagctcttattattttgagatatgtcccatcaataccgaatttattgagagtttttagcctgaagtgctgttgaattttgtcaaaggccttttctgcatctattgagataatcatatggtttttgtctttggttctatttatatgatggattatgtttgttgatttgcatatgttgaaccactcttgcatcctagggatgaagcccacttgatcatggtggataagctttttgatgtgctgctggattcggtttgccagtattttattgaggatttttgcatcaatgtttgtcagggatattggtctaaaattctcttttttttgttgtgtctctgccaggctttggtatcaggatgatgctggcctcataaagtgagttagggaggattctctctttttctgttgattggaatagtttcagagggaatggtaccagcttctccttgtacgtctggtagaattcagctgtgaatccatctggtcctggactttttttggttggtaagctattgattattgcctcaatttcagagcctcttattggtctattcagagattcaacttcttcctggtttagtcttgggagggtgtgtgtgtccaggaatttatccatttcttctagattttctagtttatttgcatagaggtgtttatagtattctctgatggtagtttgtatttctgtgggatcagtggtaatatcccctttatcattttttattgtgcgtattttattcttctctctttacttctttattagttttgctagtggtctatcaattttgttgatcttttcgaaaaaccagctcctggattcattgactttttgaagggttttttatatctctatctccttcagttctgctctgatcttagttatttcttgccgtctgctagcttttgaatgtgtttgcttttgcttctctagttcttttaattgtgttgttagggtgtctattttagatctttccttctttctcttgtgggcatttagtgctatgaatttcccgctacacactgctttaaatgtggcccagagattctggtatgttgtgtgtttgttctcattggtttcaaagaacatctttatttctgccttcattttgttatgtacccagtagtcattcaggagcaggttgttcagtttccatgtagttgagcagttttgagtgagtttcttaatcctgagttccagtttgattgcgctgtggtctgagagacagttttttataatttctgttcttttacatttgctgaggagagcattccttccaagtatgtggtcaattttggaatcggtgtggtgtggtgctgaaaaaatgtatattctgttgatttgggtggagagttctgtagatgtctattaggtccacttggtgcagtgctgcgttcaattcctggatgtcctttttaactttctgtctcgttgatctgcctaatgttgacagtggggtgttaaagtttcccattaatattgtgtgggagtctaagtctctttgtagatctctaaggacttgctttatgaatctgggtgctcgtgtattgggtgcatatatatttaggattgttagcttttcttgttgaattgatccctttaccattacgtaatggccttctttgtctcttttgatctttgttggtttaaagtctgttttatcagacactaggattacaacccctgcctgtttttgttttccatttgcttggtagatcttcctccatcccttcattttgagcctatgtgtgtctctgcatgtgagatgcgtctcctgaatacagtacactgatgtgtcttgtctctttatccaatttgccagtctgtgtcttttaattggagcatttggcccatttacatttaaggttaatattgttatgtgtgaatttgatcctgtcagtatgatgttagctggttattttgctcgttagttgatgcagtgtcttcctagcatcaatggtctttacaatttggcatgtttttgcagtggctggtactggttgttcctttccatgtttagtgcttccttcaggagctcttttagggcaggcctggtggtgacaaaatctctcagcatttgcttgtctgtaaaggattttatttctccttcacttatgaagcttggtttggctggatataaaattctgggttgaaaattcttttctttaggaatgttgaatattggcccccactctcttctggcttatagggtttctgccgagagatccgctgttagtctgatgggcttccctttgtggataacccgacctttctctctggctgcccttaacattttttccttcacttcaactttggtgtatctgacaattatgtgtcttagagttgctcttctcaaggtgagaagagaagtttagggaaaaaaagagtaaaaagaaacaaagaaagcctccaagaaatatgggactatgtgaaaagatcaaatctacctctgattggtgtacttgaaagtgacggggcgaatggaaccaagttggaaaacactctgcaggatattatccgggagaacttccccaacctagcaaggcaggccaacattcaaattcaggaaatacagagaatgccacacagatactcctcaggaagagcaactccaaaagtaattctaattagtagaatttatcaggaatggaccagagcagactctgtttttttttttttttttttaagaaacctagctatttctgcaacaagagattagaaagagtaagaaaaggcaaaagaaagatatatagaaggaaatccctagtatgccaagaagagcaaaggtgattccctggaactgtaaaacagatgtagtgtatttgacttttcctttttggcttttgcttgaatggatgaattaggcttcacaatactaagtgacaagctattaggttttcttcattaaagagcttgaactatagattattatttttccaatttatattttggaacttataaagtcaacatagttaaatacacttctgaaaagagacttttctgtgaattttacattttactatatttttccaataactataaagaagcaacttcatattgtgtttctaaaagtaaatctgagaatacacgtagaaacatttcggctgaagagaacaactatgaaagagatatttcaagagaatgaaaaatattttttgtttgtctgaaagtgaataatgtgaaggtgctttatagggccctgtatattttacattttaataataataaagacaatagctaaaagtaaatgagctccgtaatttgcttggtgatttctatataagtcttcttttatgtaaaacacaaaacaaaacataacccaaaaaatctatgcaaaatataccaggatatatctttttttttttttggttctactactgtattagttcattttcacgctgctgataaagatatacccgagactgggatatttacaaaagacgaggttttattggacttacagttctgtatggctggggaggcttcacaatcatggtggaagaaaaggaggagaaagtcacatcttacggggatggcaggaggcaaaaagaaaccttgtgcagggaaactgccatttttaaaaccgtgagatctcatgagactcattcagtaccatgagaacagtgaaggaaagacctgaccccatatttcagtcacctcccactgggttcttctcatgacatgtgggaattgtgggagttacaattgaaaatgagatttgggtagggacatagccaaaccatattaactactatacaaattaactatttaaatttatttttttaatgtacattaaaaactgtaaatttcttaaggaggaaagaagaaactgtttttcattttctaggtgataagttaggaaacattaagaaacaagcttgtgatcttatcctgatctcaaatgacataaatttagaccatatttcatctgctgcctaaagtttcagcatcctagggaaagaaaagaacagatattttaaaaagaaaataagaatagaatttatatttcatatgttaagtactaaaacaaaatcttaggatctgctgacaagttagagaatgcacaaagcaatggcagatattttgaaaaatctagaatttaatcttgactattgtgatttgcattctgtagtttcatctagctgtgcaaggaggggtagaagtgatgttatttcaatcagctagtcaataatatttaaaatggaaatgcattagaagactatcccatatgacactaaccatggaaaatgaagaatacgattaagagtaaatatttaaactacagccctgggaatggagatggtggtactgggaaaacccagctaagggagaatcacgtgagtagaaaggaaaatagcttgttcttcttgtgggaaattttaaataactacttgattagatttttctttctatttctgttttaataggaaattattttgaataggatttaaattaaggaaatatttctaaacctctgatatcaagaataaactagataaaactaacacaattattttcagcaaagaggaaccaagaacttaaagtcataaattagcttttcttcagttgaatgctgaagaactttctttttttttcatctaagattatgcagccaactcatttcaaaggccatttaaaagcaagattggatttttggaagaaagaacagaaatacccatagcagtctatgatcttaaaggaccaaatagagcacagaaaagaacatggcgtgaattattcaatttcagttctgttgccacattcatattgtcaaagctgaactttttacttaagattctacaataccttgtaactatttaaccaataaggattctgtttccaggtctctaaatacttgtgaattgttaaaccatatatttatttggatttttgtgtccctattcataattatagtatctgatagggttaacaaatatttacacttttaatagcaactattaaaatatagtaggttttcagactttcatacatgtgtactctctctctctctctctctctctgtctctctctctctctctatatatatatatataattgtgccttatattttgttacagaatcactagagatatattctcaagtaacttgctagtaaggagaacaacctatgagaggtgaatattaaattttagcaatattttctttacattagggactaagtattgattttagaatttctttctctaaagattaataaaaattaataatattttgaaagagtgtctcaaaatgatttacaatctaatatttttttctgagccaccttctcgttgttcagtgtgagtgattgagatgaatgattgatatccaggtttctctgtttgctaggtaaaaataaagagaaaattatttaaatgtatcaaatagtaagatttctctaggtgattctccctgggtctgattctaacataaattaagttcctgctaaattacgttgcaatgtgagtaataaatgtttgttgatgactgagttccgttgtaactataaattgcctgtaacaatgagcagagggtaagcttggaatttaagacatattgtagacaagtgtcttgaagaaagcaaaaaaaaaaaaaaaattcctacattttagtgaatgctgtgacatttctctctttgagaaaagaggatatgctattatcttcctgggcaagttgaggcagaatgggatgctaataagctccagaggggcttacactaaggagttggatttcagttggaagaagggttctagtggctaaaaggcaataagaatattcctaaaatatttttgtaagattgtatattgtcttgtgaaaagatgctattaatacattattaaagagaaaaggaaagaaaacttatttttgggagatagtatagcttaatgaagaaaacctaaagtcagagagatgcaggttcaagtttcagctctgccaattactagttacgtcgtctttgtcaacattgccgagcctgtttctctgtgaaatgaggatactaatacccagtagggtttgggggacattcagaaaagagaggattggttgcaaggaatgaacatcccgaaggattacaatgagacagggggaggctgctcataaaaaaaaaaaaaaaaaaaaaaaaaagatagaggatagaagttagccttggaggctattaaaagagaagcttaattattcattatgtgtataaggaaggagtctttattctaggaatgaaaaattcaagagacctcagggtaggcagctaaggaaaatttaaggaaaggaacaaagaaagcaacacagaagaagaaaaaaacaaagaaatgaatgaagtatatagttttctcagtattgaataaagccaaataaattaattattaaattacataatatctccttctcattattgtttaaacagaagatttatttatagttatttgaattgctttgaagggttggttttagaataagttccaggggcaattggagttaaaaaatattattaaaattattaaactattccagagcacagaaaataaacacaacttcaaaaatattgaataaatgtattaatgtgccaagtgatcaatataatacagaatggaaaacaaaggactgtgtaactttgtctgttaacctagatgtaaacatttaaataaaagtttaacatattaatctaatagtataaaaataagaattcaacgtgcttggttggattttgttacagacatatcgggtggttgtaaacaggagattgtatttatgtaatttttatatcaatgtgttaaaggagaaaaatatgtttatataaaagagtctggaaagaaataatgattatttcataatggaaaaaaagcaatgtcactgacactatgatcattcaacatttttttaaaataaattaattttttttagttttagggattaggcctcactctcttgcccaggctggagtgaagtggcgcagtggcacagtcatagctcactctaaccttgaactaactcctcaactcaactgatcctcctgcctcagcctcccaagcagctgggattatagacatgagccaccttgcccagctcagtatcatttttcacattcaagctaatgaaataattcaatagaattaaacaaatgcttttcaaaaatgaagttggaacaattagtcatccatagacacaaaacaaaataaaccagcagacaaacaaaacttcatattaagcctcatgccatgtgtgaagatatacaaaaagtaactcaaaatagagcagggaggaatatgtgaaataaaactataacattttttaggaaaaagccataggagaaagtttcaagaccaagaaataggtgaaacattgttagacttgacagcaaaagcacgattcataaaaggaaaaattgattacctggatctcataaatattgatacctttttctccacaaaacattttctaaagagggtgaaaagacaacttacagactggagggaaatatttgaaattcacgtatctgacaaagcatttgtatttagaatagacgaagaactcatcaaatgcagcattaaacaaacacaccaacgaaataattcagttagaaagtgggcgaatgacatgaacagatatttcactgaagactatatgggaatcataaataagcacattaaatgatgttcaacctcattagctactagagaaatgcaaattaaaccacaaggggatatcactacacgtatataagaatagccatttttttttaatgacatcaaatgctgccgaagatgcagagaaactggatcatttatacattgctggtgagaatgtaaaatggtaaaactactgtaaaaaagcatatggaatttttaaataaaactgtaatgtgtttacatttgacccagcaactgcatatttgggcatttatcttggagaaaagaaaatgtatgtttgtacaaaaatctataaaaaaatgtttatagtaactttatttttaatatccccaaaccagaaataacaataactcaaatgttcttcaatgagtgaagagttaaagaatggtctctcaataccctggaatattactcagccatcaaaagtgatagattatttatacattcaacaacttgaatggatctcaagggaattattctgagtgataaaagccagtccaaaagcttaggtatggtatgattgtgattatatagcattcttaaaattacaaaattttaaaaatggagaacagagtagtggttggttgccaagggattgggtgggggactgttaatgaaagagtggcagaagagatcctagtgatggaactgttcttgactgtggtgctggtcacctgtgatgcagttgcgtagaactaaacacgcaagaatgcacgtgaataaatgaatacatgtaaaactgcagaaatctgagtaaggttgatggagtatatcaatgtcagtttcttttcgtgatattattatgcaggatgttacttgtcattgagagaaactgaatgaagagtacacagactttctctgtaatatttcttgcaacttcatatgaatcttcaattacctgggaagcaaatgcatacatagtataattagttgcttaaaatttggaaaagaaagaaaaaagtaatatgtttacagatgctataatttaatatgtagaaaataaaaactcataattgaaatgtttaagaaaatgtgatatggtgtaatcattaatcttataggtataaaaataatttagaatgggaatgggaaatattctgttcacaataccaaactatatatactttgcactaaattcaattggaagggcaaaggacttatataaaaaatcaaagataaaatagtattaatgtacataaaatgaggatggaatatttctgaatgaaaagccttaatattgtgaaatgtttaaaattttccagttttcactgttgtgtgtatgtatattatatatagtgttattttaataaaatttctatttgagttgtaatatgattttaaagctcacatgaaagataccatgtttgaaaattaccaaattattattttaaaatttatttgaaaataagattatttggtgtggtggacttacagccttttttttaagttaacatcttcctaaaaaatgtaaatgaaatatgtggaactcattaggaacaaactaaatgtttttggaagacaaacagatgcatgcatataaaagaaatttatatatataatacagttaattttttaaatttaatagataaggatcatttaagtttgttagcataatttctctcactgaaataagtacatgcctacctcccacctttacctatgtaaatttattgtatcaaataagtcaatgtttatcaaatatagatgataaaatataattctctaaaaattgaagggatctgattagacaaaataatggtaaatttacgtgatagggaaatttaaaaattttgaaacttatctatatcaaacttttgttttattgagatacctcatagaataaatatatttctgaaaccctaataaaattagctcatctgattaaaatcccatacttttatgatggaagctgaattctggaattaagatattttttcgcttgtgaaacaaaaagcacttatccttttatcgcaaatgttcttcctccttctcctgcccctagtattcccttcctctgccttttgaaacatgtaatacccagggtttttttaatagtttttttttataatagattatttttcagagaaattttatattcacagcaaaattgagtgaaaggtacaggaatttcccatattctcttccccctgacccccctgtgcctgatacagaccatgcatagcttccccaattatcaacatcccgcaccagagtggcacaattgctatcactcatgaacctatattgacacatcattgtcacccaaggtctgtttggattcactttccagtggattgtgttgtatgggtttggacaagtaaataaagacatgtatccaccattgtagaatcatatggaataacttcaccaccctacaaattctctatgttcacctgctcattccttccctcgcaattcctagcaaccactgctatttttactgtctctatagttttgctttttcaaaatgtcatgtagttgagattatatactatgtagccttttcttattggcttctttcacttcataatatgcatttaagtttcctccatatcttttcatggcttgatagctcatttttttagcacagaataataactcattaaaaaaatgtatctatttagccattcacctattgaaggacatcttggttgcttccaaattttggcaattattaataaagctgctataaatgtttgtgtgtaggtttttctgtgttaatatgttttcacctccttttgggtaaatacaaaggagcctgattactggattgtatgataataatttgtttagttttataagaaaatgccagattattttccaaagtgactgtaccattttgcattcttacccaggaattagtgagagttggtcattttatgtttaagtgaggccttctctgattttttctgtgagacatttcctttcttcaaactcatttagcactctctatccttatactgacatctattatgtatgtatgtgtgtgtgtgtgtaatttgttttttgagacaaggtctcaccctgtcacccaggctggagtatagtggtgcagtggtgcgatctcagctcactgcagcctccgcctcctgtgttcaagcagttctcccacctcagcctcgcaagtagctgggacctcagacatgcaccaccactctaggctcattttttgttttatatattttggttgacacggagtttcaccatgttggctaggctggcctggagctcctgtcctcaagtgatccacccgccttggcctcgcaaagtgctgggattacaggcatgccccactgcgcctggcctgacatctattatatgttttgttaagcatgtgcaaacccctcagggcaggacagagatatgtctcctatcctttacagtactgcacttgttgccttgaaattttttaatgaaactagaaaatttgtgaatgaattaagaaattctggtgtgtcagactgccaggcaaatgatcaaatatatatcatcacctaacagcatttcgttttgcaaagctctatacaattacaatgtcttatgctaaaattataatcaaacaatactcactatttttactataattttttttccattttttcttggcagttattttatgggttaaatgcatgattgatttatgtgaaagggaattgcatttgacgttattgactctttgccccagccttttcagctagaaaaaagcaaagctcttgctgtaacaagtgctgaaccttttcagaataaaatctaatgaggttagtatatatccttgacattttattttcaaccgaagtgaaggtcatagctgaaaggtcacaaagatgaatttatacagcaaataaacaatgttattattttgcaaagaaaatgcaatattcctgtctttagcctcttgcatgtaaaagggtgtttgtaatgctgattttagtattcaagtcctgttatcttttcatttcttatattttggaatgtagaaagaggaatacacctagcttatctataaaagactagtatgaaatgtgtgtattatcattaatattctagtattttattatttgaactttacatttaagtcaaatctactttgtatttgttgggtactaatttttttggtggaagtaggtaattactctatttccttggtaaacttctttctgacttgagagtttagtcatacataagtccctcaagtctaccatctttggtttttaacaacaaaactgtacatttccaatgaaagaatatatcaacataagtttggaaaataaggggctgaattatagttaaatggtagaaaatctgcctttttgggcacaatgtacaacaggaattcttaactgctttcatattatattactaatacgtaacatgggattgctctattaaatttgtaccagatcaagacaattttaatagtaaaaatagtttcatttatttaaaaagtcattaaacaaagttcaaatgccaaaaaccatgtcaaaatggtcactttatattgttatgtagttaatatattttagagcaaatattccaaattttgtaatttgctccttttaaaaaacaagcataagataggcatctaacctagaatttcctttattttagatgaactcacaaattcgtcagaaaccagattgtctttggaagacctctttaggaaagactttgtgcttcacgatccagaggctcggtggatcaatggtaagtgtatacctttttaaacattgtattcattttgagttctgtataattaaaattttaaaaaatgagatgtgtaagctgggcgcaatggcttatgcctgtcatcccagcaccttgggaggccaaggcaggagaatcgcttgaacctgggaggcggacgtcgcagtgagccgagatcgcaccactgcactccaacctgggtgacagagcgagactccatctcaaaaaaaaaaaaaaaaaaaaaagatatgtgtagttaatatttaattgaaagtgtacttcaaagattacatgggtattatttaaattaaaaccttggttcttgtgagagaaaatcaattcctaagatagggcgtcaataaattatttggcaaacattgggttgacagttttgtatctgctgctctctcatgatcattagttacatgactttaaggatgtattacatctctagcacatcactagataatttttcttagtttggcagtgtacattttgggagctagtacgtagaaatgttaagtgcttcagatttgacaatatgattggtttttgttattctctgtggcttttctttttaagcttaagtgttacaagctagtgagactctatgcaaaattgaaatgacttggaaatatatggcactttgttgtttttttttctggcctggcaaataggactccttaggttctcttaagtcaatctctgacataaaaataagaaaataaaaccactgagtggcttcataggttttgctttgtctttatggaagatcataagggcataatgtgttggtgaaaaggaaatcagttttttaatcctttgaatgttctaatttgaccaaccatacgaatcattatggttggatagctgttaatctttacccttcactttatttgggcataatatctttgctaattttcaaggcatagagtgtattatttgtataatagatgaaaggagctttgccttttcatataataaagatcatcatacttacagtccattccttcctctctcttactctacttaagtgtatttatgctggtgaattaaactttaatttatggaagctatataaagagaatgtaatttaacccatgagggcaaaggccaaatcacatgtgtttacttgacactgatatgtctcctggagatctgcaggcactcgagattggttttttgaataaatgaatgaatgattttaattgatgtgcagtctcattttcacataaacttaaattttaattgaaatcaattggaagataagtgtgtattgtgatgatattacggataaagaacacaaggtagcatttttcttaatgaatctgtatatttttattttgaattgtttataaatttgaggctagtcatatttttgcctttgtactgtgattatttcacatatacactataatgagtgctatgactaaagaaggctaataaaaaagatatattatcacaaaaaattgtccaaatacacaaatctctcataaataattcttctaatgtgtgattataattatgacaatcacctgtttactctttagcaaatattttctattgagagaaatgacaaaatgaaagttgctaggtttttttaaacagtagtattatgagttgttagatttgaaatgctgaataatcttgttttattcaccatgtttttggacaaattatagacattttgtagtctttgactttggaaaacatgaaaaattatgggtctcatctcccttctcaggttagcttggactatttagaggcatttactcctgtgtataactgactctgtgatattgaagctccgaaggacaggacagatatttaagtagtgaactgcatgctaaattaaaacatatttcaatatgtaggacacagattctactcttatacttcataggttaccaaaataatatatttggagtttatcatttttcaagtaatttctttattaatcattggttaaatttgatcctaagaaggcatctgggacaaagctgcagtgttattataatgttctaagtaatacctaaatatataatttttataaagaatttgacataaagacaactctttaaattggaataaacagaacctaagctctgaaagaatgcagtctttataaataccattgaaggaactgtctcaatgcctgtaaattgtgtgcactgagttactttttaagtatagaaatggatttgtgcttttatccaacccagatctttctggcaagtgctagatacttggcctatttacgtattcctcacatagcctggaaattcaatgggaaatatatgagtaggatgtgtaaccttggcctcattatcaacagttatatctaaatgtaacctgtgagctttttctttattctcaagtgatatctcaacaggttttcttagtacataagtcacttgaaggagttcgagctcagcttatttggaagcatcatttaattcttggaggtcatcatagaagtgcttaatgcattattggtcaaggggaaggagggagtctagacggccctgacatgtgtaggttatagtgaggcgatgccattcattatgcttggtctcaaaaaatatgtctgagaatatcattgcagtcttggatgggtgcccctgttcatggttagcttaacaacggccttaccccaagtctgctcatatctttgaaatctacatttttatagcatcttcattctagcaatgtcaccttgaaatttgaaaacccatcttatttaaaattattcattctatccacacacatttgataatcaattaatcaccaaagaaagatctaacattgagtgccttctattgagactctgtgatcgatgctttatgtacatatttcacaggactgcatatgacattaaagttaaccccagaaaactgaggcttaactcagaaacttatccgaacacacacctaataaaaggcagaggctgctttactcattatgcttaagtataaaacttgacctctttcattgtttgactctgatgtgtcatcctcatatctaacatatttatcaagcacctcactgacaatctcattttaacagacctcattgctgtcgtagggtggaaaggtatgaaagccttcctcacccatcataaaggtcacagccaacactgctgtaacaaaagaccagttaaaaagagaaaagcataacaaatttatttaatgaaagttttatgtcacttggaagactttagaaatgaagaatcaaaggcctagggaaaactgtccatttgtatgcttaggttaaataaagtacggacagtgtattgaagtgtgactggacaaaaagggtatactctaatgataataaaatgagggagaaacccagcaaagcttacctgttcagatccttcttggcctccctgtgtagcatttcatcctgccagatataaggcagaactcccccggaaatagggtcttatgatctattatctgaaaggtaggtcagtgcatttccttgtgacagctcctacacagaaaagcagaggaaggttaaaatatttttaaatcttatggtttgcttggaaagagggatgctagtttcttttattattgttattatactttaagttctagggtacaagtgcagaacatgcaggtttgttacataggtatacatgtgccatggtggtttgctgcacccatcgtcccatcatctacattaggcatttcccctaatgctatccctcccctagtcccctaccccctgacaggccctggtgtgtgatattcccctccctgtgtctatgtgttctcattgtgcaactcccacttatgagtgagaacgtgctttgtttgtttttctgtccttgcgatagtttgctgagaatgatggtttccagcatcatccatgtccctgcaaaggacatgaactcatccttttttgtggctgcatagtattccatggtatatatgtgccacattttctttatccagtctactattgatgggcatttgggttggttccaagtctttgctattgtgagtagtgctgcaataaatatacatatgcatgtgtctttatagtaaaatgatttgggagtaatgggatttcaagtttttgtaacctttcctggggtagaggaatctggtttctattacttgcttcagggatggcagagaggtaggagacaggaaggcagaaggaggtcagatacagactttgcttctgagactgctcagaggccttccaatatcttagtcagttcaacgtactcagcatgccaccatgccatacttggaggtatcattttctgagtcccaacactattaattttttcatgttgaatactacaataatatgtttatttccccaggtacattcatgtagtggtaacttatacagtcactaaaactagagtttatacacatgtttattgacttgatcatgatctagaaaagtgaacaaagtaacttcaaaacagcattgatagtatgtgatatcacattgtctattgtgtaacagtgattgtctccagattatccctttctttttacttattttgttttttctcgatttttttcaataaatgcatgtgtttacatagtttttttttataattttaactttttattttagatttagggagtgcatgtgcaggtttgttacatgggtatcctgcaacgttagcactctcaggatattcattttgagctattagataaaatcaatcaagtgctattttatttttaaactttgttttccactgtgtcagaagacaattccaaaatttatctgatggagtataaacaattaaaattatcatttgataaaaaaaagttgtaaattttaaatacatttgggttccagtggacaaacataccatcatgtaatgagattttaccgtgcagctagtgtgtcctttactcaccccatgagtttgacaacacctgctcagtgatattggtccacttaccatttgttatgaacctgcagcaatatcaaattgctatgaaaatttttaaatgtgtacccacaattaaacctacctgctctggaccagtggtcaacccttcaccaactggctgtagtaagataacaacactcttagcacagccctttcctaggagactataaacgatgaggaataactgtcagtattcaatgagtgctccataaatagtttcattataatgagaacagtgtatatgtaatgggatagaagttgtttcacatttcttttgcaaaatggcatgctgggataaatgataatatgtgaggctttgggttttattttgatcttattggactcatgttggaaaaaaataaactcacttgttacatgagattccaacacagatattttaacctgctgtctttgtaacgtgtgacagtataatatgtggaaatgggagactcattaaatcaaggtaagccatggcctttcagcaagttatctaagcctcttaaggcttggtttcttcattcagagtgaggacattagtgccatagctagaagcataatacaaagtaagtgagcaaaaatatgtaaaaagtgaagataaaaggtaaaagttaaaaaaagaaaagaaaaaaactataaatgaaaagtcaaggtctgtagccttgtggatcttcaaatggtagcgattcatagaactgatgttagagatgctctgaacacctgacatttgttaataaatgcgctgggaggtctcattctcataatatatgcaggatattgaagaggcagtgaaaagtcactattgtagcctgtatgaaaaacaagaaacattattgtaatatatcaataatatttacagtaattaggggaactgtaaataggaaaactaaacaaatacatctttgttgtttcttgcttgtttgtttgacactaatttgtcatactagaattattgtccatcaacttcacttggtagagctgcagaagttgttgtgtttctcagtgcacagggagctacttctaactccaaagacatcattaccctccctttagcctatattcagcccccagtcaaaattatcttatgtttatcttattttgtatcttcgtgaccaaagtgttattttttataatcatcaaccaaactgatagttaaataaaatagagttgaatttatattcatgaggctcttgaagataacacgtatttttcttgcaacataatttataaagataaaaccttgcatagattctagatgcacacaattaggtatatggtcaaataaatcaatttgcatctttttaatggaatactaaacagctgtaaaaattaatatttaaagtattagtgacattgaaatatgtgcagataatatattaattgaaaatagcacaatatggaattatatatatagtgtattcacaattgcattacttgcatatacacacaagtatatgcaaagaaaataatacctgaattcaatatgccaaaatattaaataattttctgttagagtgattgagttgtttttattttttccctttctgtctatattttccaaattttcaacaggcattctgctgtttcctactatggcaattttatgtactaactacggatattcaaacttttgtttgaaattcaaacctaacaagtaaatggttactaaaattctcattatggtagatgcattcagctagacaaatattaattttgttattctgcctgtgccttttttctcaaagatctgtatgaaaaggaggtacagagaggagcgtgaggttactgaacctgggagaatgagaatgttcttagcacagcaatgactattagacttaagaggcatggattcttataacagcagtttcacttccttctttcccaatagattgagacataatatttcctgtagtttattatgttcttttttcttccactaatccaaacctctgcaacatgcaatttatctatattacaaacctaaatagtaccctagcccccaaagggtttttttaaaaagtcaaaaataacaaatgttgatgaggctgtggagaaaagagaatgcctatatggtgttgctggaaatgtaaattagttcagccactatggaaggcagtttgaagatttctcaaagaacttacagcagaactagcattggactagcaatcttattaatgggtatatacccaaaggaaaataaactttctaccaaaaagacccatacatttgcatgttctttgcagcactattcataatagcaaagacctgaaatcaacctaggtgccccaaaatgtaggagcggataaagaaaatgtggtacatatacaccatggaatactgtgcagccataaaaatgaacaaaagcatgtattttgcagcaacatggatgcagcaggaagccattatcctgagtgaattaatgcagaaacagaaagctaaatatcacacattctcacttataagtgggagctaaatcttgaggatgggcagacgtaacgacaggaacaacaggcattagtgactccaaaggtggggagcggaggaggggaacaaagcctgaaaaacttccttttgggtactacgttcactatctgggtaactgggatcaatgaagtccaaatctcagtatcatacactataccttgtaacaaatccacacatatacccccaaatctaaaataaagattaaaattttaaaaatcaaataaaaagtaaaaacacataggaggctattgaaataatgacatacctagttcctgattcacagaccagagacttgtaaatgaaatttggaatgtaaatcattgttatcaaggctgacttttcttttcagagttatatatgacaaagtatcttcctatcaagagtagataatttcctactaaaactaaacaaatgcttaaaaagcataccatgaagcatatttacttctctccaaatgaccaaaaatgttttatttattgctatgttgtttgtaaaattgtgcttttaccaaagtttagattaaatttcatctgtattaaaactgtttgaaatcaataaaatggaaatatctactataaaaaatcatactgtggcaatcttacatactaactacgatattcaaacttttgtttggaatttaaatctaaatagttttcttcaagaaaatatttttaagatttcagtttgtctaaaaatgacaatacttaaactaaacaccaagagagagaaaagggatttactgataaaattcagtgttaacatttaggaacaaaaaagtatgtaagaaaaaaatatatttctatcacctaggtatgcaatgatcaaagtatttaaagagaatttgaaacacaaactaaactttagaataaagaagctaaatatttatgttaccacttatttcttgaaatataaaactatattttgatttttaaaataagaaaaaaaagcttggggaaatgggatgaaagttatgttcagagttcatcaacaagcatttattgagcttcatatatgtgctctgcacagagcttcatatattccagatggaatctgtttacatttgaaaagtttgtagtaaaatatctggtgtcctcatagtcctttgatattctatacaattgttggtcttggccttgatggcccaggaaatctgtttgtcaatacaaatatagaataatagatacattgacattgacatctatctttccatctatatatccatctatccttttatctatccaacatgtattgaaaagattgaagcacagccaaacatttttctagatacaaagatataaaggtgaataaacacagtccctttgatcaacgacattatgaatataaagggtttttttcctcattgagcacaaatctttccagttgtctcaggcttaaaagtaaaattgtaatcaaaaggctgtgaatgggacagaaagtagacataactgaagagttgcaagaaatactcagtccaattacgatgaagttttattaaccttctccaaaatcaaaaacacatcttcacatcccacatctctctctttactatgatgcagggtacacatggcacattttatttttttgagctgctgtgtacgccctgcctctgtttttatttgatacagtcttcacttacatatggtaatgatcatgactaatatatacatgtaccactgacatgttcaaaaaaaaaatataattatggtacccagagactatagaaactagatcaaaataataggcctaaaacaattaggtgaacaataattaggtgatccatttctgggtaattattttttaaaaacagatgttgcaactaggagaaatcggtttgagttaagaacggttggagtcgtctttatggaaaagataaaattcagtcgcagtctagagggcagatgagcccaggggatgaatgaagatattgttgggagaacaaggatgtgttatgacaaaatcacagaaattagcatggtgtgtaagtttaacggtaaggaaaatgctgtgtatgtgtgttcggggcctctctatgtataaaagtaatggaaaataaagttgagtaactcagtattggcatatgattagaatatgtatatttgatcattttactgtaattgttatactttgatctcctttagcagattaaccctttattagctcttaatttgaaacagaagaatttaaaattgctctgataaatgtcagctattttgtgggaatgggagttgttagtagtaggaattgaagtgggagatattagtaataggaatttacctaatacgtgttcagtaagtcaaaatttgcatgtatgtttctacttttctaggacacttctacatatgctatttatttgcatttttttgaaaacccttcttagggaggcaggatgggcattatttttgttttatacatgagtaacttgagaagcaggttttttccacttctctcagattcactcagtaataagttctggctagaagccacatctttcatgtttaatgtttggtggaaactagagtagagaaaacgtttcaagtgaattttttttattatcatgaaactaacatttgacagtgtttataaattaatttttaaaacacatagatttaaggaaaacaatattaaaggaaaagtagataagaataaggaaagattttctttgtaattgtatatgaatgtttccattttattggaatgtttagatatttttagaaaatgtaattgttcttatatgattgattttacatgtaaaaaaagaagtcattgcagataatcataataagaaactgaaacttaggacatattttcattttttaaaaaaatgtattctttcttgtcaacttttattttagattcaggggtacatgttgttacctgggtataccaggttgttacctgggtgtgttgtatgatgctgaattttgctgtatgattgaatatgtcacccaggtaatgagcatagtacccaacagatagtttttcaaagtttgtctcccacattccctccctaccccctcgtattttcaccagtgtctaacattcccatctttatgtctatgggtacccaatgtttagttcccactttgcttgtggtatttggttttttgttttggtttttagttttagtttttttgtttctgcattaattagcataggataatgtctcaaaatgcatctatgttgttgtaaaatgacataatttggcctttttatggctgcatagtattccatggtatgtatgtaccacattttctttatttcttttttttttcctttaagttcatgtgcagaacgtgcaggtttgttacataggtatacatgtgccatggtggtttaccgcacctactgatttgtcctctaagttccctcccctcgccccccacccaacaataggccctggtgtgtgttgttcccctccctgtgtccatatgttctcattgttcaactcccacttatgagtgagaacatgtggtgtttggttttctgttcctgtgttagtttgctgaggatgatggcttccagcttcatccatgtccctgcaaagcacataatctcattcctttttatggttgcgtagcattccgtggtatatatgtaccacattttcttcatccagtctatcactgatgggcattgaggttggttccatgactttgctgttgtaaatagtgctgcaataaacatacgcttgcatgtgtctttatagtagaatgatttataatcttttgggtatatatccagtaatgggattgctgggtcaaaggttatttctggttctagatccttgaggaattgccatactgtcttccacaatggtggaactaatttacattcccaccaacagtgtaagtaattgtaaaagtgttcctatttctccacagcctcagcagcatctattgtttcttaactttttaataattgccattctgactggcatgggatggtatatcattgtggttttgatttgcatttctctaatgatcagtaatgttgacctttttttcatatgtttgttggccgtgtacatgtcttctttcgagaagtgtctgttcttagcctttgcccatttttgatggggttgtttttttcttgtaaagttgtttaagttccttgtagattctggatattagacctttgtcagatgggtatattgcaaaaattgtctcccattttgaaggttgcctgttcactctgatgatggtttcttttgctgtgcagattctctttagttcaattagatcccatttgtcaattttccttttgttgcaattgcttttggcatttttggtatgaagtctttgcccatgcctatgtcctgaatgatactgcctaggttttcgtctagggtttttagtatgttgggttttatatttaagtcttaaatccatcttgagttaatttttgtttaaggtgtgaggaaggtgcccagtttcagctttctgcatatggctagtcagttttcacagcaacatttattgaataggagatcctttccccattgcttatttttgtcaggtttgtaaaagatcagatggctgtagatgtgtggtgttatttctgaagtttctgttctgttccattggtctatatgtctgtttttgtagcagtaccatgctgttttggtgactgtagccatgtagtgtagtttgaagtcaggtagtgtgatgcctccagctttgttctttttgtttaggattgtcttggctatacagggtcttctttgattccatatgaaatttaaagtcgttttttcttcttctgtgaagaaagtcaatggtagtttgatgggaatagcattgaatctataaattactttgggcaatatggccattttcacaatgttggttcttcctgtccatgagcatggaatgttttccatttgtttgtgtcctctcttatttccttgagcagtggtttgtacttccccttgaggagcaacttcacatccctagttagctatattcctaggtattttattctctatatagaagttgtgaatgggagtttattcatgattttgccctctgcttgtctattgttggtgtaaaggaatgcttgtggtttttgcacattgattttgtatcctcagactttgctgaagttgcttatcagcttaaggagttttgggctgagatgatggagttttctaaatgtagattcatgttgtctgcaaacagacacaatttgacttcctctcttcctatttgaatacccttacttctttctcttgcctgattgccctggccagtacttccaatactatcttgaataggggtagtgagagagggcatccttgtttttaaccagttttcaaagggaatgcttccagattttgcccattcaatatgatattggctaggggtttgtcataaatagctcttattattttgagatatgttgcatcaatagctgttttattgagagtttttctttatccagtccactgttggtaggatccttggttgattccatgtctttgctattgtaaagggtgctacaatgaacatatgggtgtcttcttggtagaatgatttattttcctttgggtatataccaagtaatgggattgctggattaaatggtagttctatttttagttatttgagaactctcctaactgctttctatagtggctgaactaatttacattatcaccaacaatgtttaagtgtttttgaaccattgcccctttcctctctcccatcttttgtattatccagcatctattgttcccatctttatgttcatgtgtactcaatatatatttcccactataagtgtgaaaatgcagtatttgatttgttctttctttattaattctcttaggattatgtcctaatggataatggatagtgacctaatagcctaatggataatggtccaagttcagagtctcatctgagacaagggaaatcccttccacctagtgcctgtaaaaccagaacaagttagttacttccaagatacaatggaggtacaggcattggttaaatatacccattccaaatgagagaaattggtcaagggcctacaggccccatacaagtccgaaattcaataaggcagtcataaaccttaaagttccaaaatgatctcctttgaacccatgtctcacatccaggtaacactgatgcaagaggtgggcttccacagacttgggcagcgccactcctgtggctttgcaggctacaacctccctcctggatgctttcatgggctggtgttgtgtgtgcagcttttccaggtgcacagtacaagccgtcagtggatctaacattctaaggtctggaggatggtgggccccttctcacaactccactaggcagtgccccagtggggccactatgtgggggctcctactccacattttccttctgctctatcctagcagaggttctctatgaggactccacccctgcagcaaacttctgcccggacatctaggcatttccatacatcctctgaaatctaggcaaagtttccaaaactcaatttttgttttctgtgcacccataggaccaacaccatgtggaagcttccaaggctagggatttgtatcctctgaagcaacatcttgagctgtaccttggccccttttagctaggtttgaagaggctgggacacagtaccgaggctatacacagcaggggggccttggacccgacccaggaaaccatttttttctcctagccctctgtgcctgcgatgggaggggctgctgtgaaggtctctgacatgccctggagacattttttccattgtcttggtgattaacattgggccccctgttgcttattcaaatttctgcagcctgcttgaatttctccccagaaaatgggtttttcttttctatcatatcatcaggctacaaattcccaggcttttttgtttgcctcctcttgagcactttgtcacttagaaatttctgctgccagatatgctaaattgtctcactcaaattcaaagtttcacatgtctctagggcaggggcaaaatgctgccagtctctttgctaaagcaagagtgacctttactccagttcccaacaagtttcttgtctccatctgaaaccacctcagcctggacttcattttttacatcactatcagcattttggtcaaagccattcaacaaatctttagggagttccaaactttctcacatctgtctgtcttctgagccctccaagtctctgggaagttccaaactttcccacattttcctatcttcttctgagccctccagactgttttaacctgtgcctgttacccagtttcaaagttgcttccacattttgggtatccttatagcagcaccccactctaccagtacaaatttactgtataagtctgttctcacgctgctatgaagagatacctgagactgagtaatttataaagaaaagaggtttaattgcctcctcacagttcagcatgcctgggaaggcctcaggcaacttacaattatggtagaaggggaagcaaacatatccttcacatggcagtaccacggagaagtgctaagcaaaagaagaaaagccccttatagaaccttcaaatctcatgagaactcactcactatcacaagaatagcatggatgtaaccacccccatgattcaattacctcccaccggatccctcccgtggcacatggagattatggaaactacaattcaagatgagatttcactggggatgttgttgcatatgagatgggtttcttgaagatagcagatggttgggtctagcatttcatccaacttgccacactgtagctttcaagtagggtgtttagatcatttgcattcatcgttaatagtgatatgtgagaatttgaccctgtgatcatgttattacctggttgttttgtggactcgattgtgtagttgctttatagagtctgtgaactatgcatgtgtgtatgtttttgtggaggcaggtattgttcatttgcaggtttagaactcccttaaagacctcttgtaagactgttttggtgataataaattcccttagtgtttacttctctggaaaggattttatttctcctttgcttatgaagcttagtttgacagaagatgaaattatctgaaatttttttaatgatatgaaaatagacctacaatctctttttgtttgtaaggcttctgatgacaatcctgctgttattttgatggggttctttttgtaatagacctcacccttttctttagctgcctttaagattttttctttcacactgactttggaaaatctattgaatatgtgccttagagatggtcttcttatatctcataggggctcaacaaatttcttgaatttgtgagttgacctctttcatgagattgggtaaatttttatgaaatgtattctcaaatttgttttccaagttgcttactctctttctctcacaggaatgctattgcataataggcttggtttatttacataaccctgtatttcttggaggttttctttctttaaaattttttttaatttatatttgtcttactgaattggttaaaaggaccagtattttcattctgagattatttcctcagcattgtctattctatttttaatgcttctaattatattttttaatttctctagtaagtttctcaattccagaagttcagttttgttttttcttaaaatgcttgtgttgtctttctactcttggattattttactgctgtctcggattgggtttcagctttctcttgaatcgcattgagcttccttgttaccaagattctgaattctatgtctgtcatttcagccatttcaatttggtaaggatccattgctggagtgctagtgtgattgttttgaggtgaggagatactctgactttttgaattgccaaagtccttgcactgattccttcttatctgagacggttagtgttattttatctttcagaagttgctgtcatttggatgaggcattttgtttttatattctttttctctctggagggtgtgactgtagtgaatgttttgtattgttaattggctttgtttctgggtgctttcagagggttaagcctctgtacaggttatttaattatagctagatctctacattgtatttcacaggcagtgtgtggaaggcatttttgtttggtggtgtaattcagactgcgttccattagatggcatttaagaataagagtcagcaggtatgttcttattcaactgtgtgccttttttgtatttcagtgcatttgtgtagtgttccaggttggaggagttggggggaatcaggggatgactctctcaccaagttttcattcctgggacttgggggagctccctgtagtctctggtgctgtgcccacatttctttagctccaagggaggcctaggctggcagtgctgtttcctcccatggagtggcctgagccaaaggttaggttggcaggagacccgtagtcccctaggggcctgctatacctctgtacttgacagagtcagagagggttgtggggtatgtctgctggtggtctgttgattcagtcggtcagaggtggaggatcccaggaagggcagtgttgctgtgggtgtgcagctggtgtggtacccagggcctagagttttttgcccagagattgctgtctggacttcccagcttgtgcttgactgatcaggtctccttccagtgtctgtcccagtactgagcttgcccagctagttttgtcccaagccttttgttctccgattgcttgtctgttaggtgctgcagggcatggagctccctcaggcagaggctgaggatggcagataggccacacccttcctagattggtcttccagagcatggtatacccagctgctgtgccatcccatgatcccacacctcagtcttctctgtggtctgagagtgagggctcctctcctgcttgagctcaagatctcagctcaatacccctgagccgtgtgttcaaattctagggagttgagaccaggcatgcagctttgtccttctgcccatctgggtcagatactacctgttctgcgggagggcaaagcaattccagactaatggcgagacactcaggtggggcagtagaggttgcattgtcggcatgctcttgatggagtggtcaggcaggggctttgagggtggccaatggacaaggggatgtgcagaccagacatgcccctttcccatgggaaaaacagccctgtttcctgcaccccctcatgcaaaatcttctgagttcttctcagatttgagctctgcctctgcttactctccaagcagttcccctgccgattcaaatgttttttggggtcacaggatctctcatagctaggatctcagaggtctgtggcaggagtgtggtgtcccgcagttcctttattcacttcttccttaggacctgttaagggctgagagccagttctggtgctcagcaactttgtgcagcttcctccctcttcatcctcagtgtttgtgttgcctctctgtggactttcagttttctcccagaggatctgcttgaggtgtgatggttcactggatattttggtttctcttggttggagagttgcttcttggctgcatctagtcagctatgttggccccccaactccaaattttcatattaaccttttaattcaacttgctttgtttttgcatgtatgtttgtgtgtgtatgtttgtgtgtgtatgtttttgtgtgtgtatgttttgtgtgtatatttgtgtgtttgtgcatttctttatgaatggctaaatttacttaatcagcttggttatacagtcaattcgaatgagccattgagaactttggataactatcactggtttctattgaataaacaagtattaaacatgtaggtgcattccaaaatgtctttagcaaggaaatttctagagataacattccttatcattaaatggctaagattctatatggtaagttatgttttgtaagtggggcaactaaggccagataccatgctctgcatttttagtttattatatctaatgtttatagttttctaacttaggtagatatatgcttattttataaatgaagagcttgagtttaaagcaaataggtgacttgttcaagaacacagagataaattgaatctatacttttttttaacttatatgtataatagaaaaaatccataacaaaaagctttatataactggcaggtgacgttttccaacttttggttaagctgagtaacaaacagtgagttccccatttctgctaatgttttagagaggttgggtgatcatgtgataaagatatattagtgagattcatatagtggatacgaaattattaaaaaataacctctaagttcaacttcaattctaatattttatcagtttatcgccatgtcaacataaaggtacagttgaagctactgttttaatttttccttgttttaggaaaccagttgatacattgttctagacctttcctagggaatggtgtcagctttcacagaaagttgtctgcttttcatttccagtcaagaaaactctagtgtttgacacatagctctttgctctttgatttgattggccatatggagttgttaaaacatttaaaagctgatctcaattggactttcagttgataacaccttggtatcctcttttgtgcagtcataacccatgccagttttcatgagcttgaacattcattactgggttcatgacccaagccattagcccatcactgccatgcacttgtcaacagcatctgaaagcatgaagcttaaacctatctggtctctggtgttattcaatttgtgagtgaaaaaatcacacactacctagttaatgtgtgtatatatttttcccttctcctttgaatttgaatgttctctgggttttctaccattaccagtaatgctaattatttaatttgtctctgtcacccacatctgtgataaaatagtttgtttgcacattgtactccttagcttttaatttctccaagatcctattatatttaaaagatttaaaaatgtgaaatctcttaagtagagaagtcactaagtccttgtagaccataaggattgcctgctctcctcagactcatggttaagtggcatcagtggtctgaaccattcagctgtgttgttctctaaggcccaaccaaccaccaaggtagagaaggaacatatctgtgaatcagtgtacagtacctgaaatgggaaggttagttctgtgtctaggagacatggtgcgcaagttacttgacttctgtcagtggccatatcttcttcacctataggactgagaggataattcctcttatgcctttcttctaaaggcattgtgagcatcacaggcctatgctttctaaacattataaaccacttaaaacattcttgactccatctcttattgaataaaatttatttttcatttctctagactctatgactttgggcaagtcaaccagtatttctgggcattagttttgtcaaagcacctgagtgataaccacagttatttattgggagttgagtatgtgcccatcatcgggccaataaggtttggttaactgtatttattcctcatgaattattttcattgccttcacttgatggctcaggaaatggagcagagagagctcggtaacttccctaggctcacatagctagttagtagcaaaggtggaggtagatgcttcaggtcattaaataaggtagcaaaggtggaggtagatgcttcaggtcattaaataaggagggattaaaatatttcatggaattatcctaggtggcgtctaggttcaaagaatgtaaaatgcagagaataaaagatctgctttttttttctttgttttggccaacttttttcaccagcctgtatttcctctcctttctttcttatctgttttgaaattccaattgctgccttcactttggcagggtagatgggggtggttagagttgccttccctgctgtgcttaagttcttattgtgtaaagatcctgtaactcgctaaattagcttaaaaagctctggttttgttttcgtgccagcatattacctcaccacactatcactttttaccctccaagacttgccataccaagtggcagtgctcaaatcacataaagaggagccgttgttgcttgttcgctagtacgtgggtttgtatccccaaaccatgtcttttttacatgatactaattttgtctggaatattcttatttttccatacaaaaagcaaattcctgcttttccttatgaaacatcagtcagttcttctgtatactcaaccatgactttcccagacatcttttttttttttttttcctttaagttgccagcatgacttttatgcttagcaatgtttggattccatgttcctaaaccaaattttctcagagcagggatgctggtttttgctttctgcattttcagcatcaaacacagtatctagcacgtagttacgctgttgtttcagcaaatgaattactactttggtacaacagaccctaattttaatttgaagattgacacaattgtgaaggtatactaaaaagttttcttgaaattttagatgaaatataagtagtagaggatattttttctccttccaaaaattaaagagaagaaaatcactcagcttaattttcgtttaacaaaaaagaaccaaagtgttatgactaacactgtcacagagtatggtgtgattactgatgatcaaacttctgtagcaagttacatgtatatataaagactaatactgttcttccaattactaaggtaagttcttagaagtaaaaatatttatgtttagattcctgaaatagtcactaatcatgaaactgtattgaagcaaaccaaattcctggaactagacagactgtgatagaatccagtaggctgatggaggtactctgcatgacagcggggcagatggatttgctgaaatccagtgttgcccaactacaaatctgccataaaagaaaaatgcaaacatggagacttttaaaataggaataatttggactctcacagaggaacattttcaagttatggtttaggtgggcttcttagagccatcctagattccaagaactaaaagtaactgcagacatcaggcagagatggtccaagttgtcaagcagaaaataaatgcattactcaaaacatgccatctcttcataagcactcttagaatttccatgtttaagaatttatttttttttctaagactgggattctttatatgaaagtatttttttttctccttggttttttaaacatctcaatacaatggcaattaattctggaaagtcaaaaccagaaagcgttttagagagtcttccttactttgccataaggtatttaagatggaagtctgttttagtttttcatagatcttacaaggcccagtccagtgcttaaaacattttaatgttcaattaattttatttgagctaaattggattcatatctactgctcaccaccatccacaagcatcatttcaaacctgtttgggaattaaaataaatgaatcctaggatgactatggtttgtctcaaggtcaaaagctgtgacagagctagatttaacatcaacagattccttcttatttatgttactaatgagtattaatatatattactgaactttttgaccttctgtaatgaaaatttctgattatagatttattttgttatgctaaaatatatgcaattttaaagaaaaaggacaccatcagtggttggcagtcagagccagggattttcttgagagctgatactgaagtattattgaaatgatataataatatattattgaaataatattttttttccattttcttcccaaaggatgcctataatgctctggatgactctccactctcagccttttatatctagcacctcattcctgaaaactttcatctcttttcactattccatgtattctgacagcatccgaaatttaccttacattacttatatcattttcttgtgtataggaacaattctactcattaataccaccactactgctattgaaattttggttctatgaatatctcaattatattccttcttctttactttattatatagcctttttgtcctggtttattccttagagttttatgctttgcttatatacaatgtacattgctatgtatgtctttaagttagtgtacagatttttaactgtcttaattgttttagaaaaatatctagtcttccaaaagtagatcaatatcagttaattggcttatctaccgagtccttaggatgatgttgtatttgtcttcataatcattgatttatttgttcctgtttgtctttgaaggaaggtctgtctatctagactcagtgtttatttctcttgactttgctgggtcttccaaggtccacacatccacaggtgcagttgcctagctcccagctcacttctcagtgtctaatcaaattccaactgttgcattcctgtaataattgatattgtgtctttacttatcgctccaattcttaccccttcagcactgaaaacagatagtgtacatgaaaaatcacattgcacccccagcagtatctttttaggaagatcggtgttggtcacgcccaagacaaaactccttagttgtagggaccttatatcccgcaatatgtggaatccatcactatcttcttaacccatcctatatacgaagatattttctgcaatttgacgtccctaatagatattgtaagagagacactatagggaggagagggttggaaagtaaaggtcacatactttaagtagtacctaagcagcagacagaccgcccataattatctgataaatgcagccatttgaattttagatgtaatggacagacagtcagacaatagtaccatggcatagagttttttttattttggttttgattatgtttgtttgtgtgtgcgtgtgtgtgttgtttttaaactactttttggcaacatagcctggtggtccaaatgttgggatttttagttaaattctagaaaatatataggtcacggatgttcttcccagtgtcttaaaggttgacggttctagttttcagtgtaatatgatgtctactatatacaactatatatgtctttattaacaatctaatagagcttttggagagcatgtgacaaatacagctaaccaggcacaattttaatattaactatcatatgactttttacttttttacgttttaaagccaactttttctactttctttatacttttctaagtgtttcaaattattaaaatatgtcttataatttttaaagatcctaggattaataaatcactgaaactttaacgaggtgcaatatcaaggcagtcttttgtttcagaaaatgattacaattattaatgaataacaagcactaatacaactttgtacatctttttgttatgtgtatgactgacatttatttatttgaggttatggtaaaattaaaattctatactatatctaataaaactagttttagtatttgtgcaaacagaagttgacatttgatggagatgcaaaaggaaaaaaatactcattattctaggttttagattggaatctaaacatttctaattgaaaacagtttaggaattaaagaaaccttgtcctagttctgccttcctctggtgtgtgtttaggttcatgtcccttaatctaagggaaattagatagctaaaagtcatcagtgaattcagcacacctttattttagcctttgctgtaaattaaggtctgtgaccattattgaaggtttacctgaactccttacaatattagttttccatttcttcttgtcctgagtttgtgctaacaaaatcatacgaagaaaaagagaagaaaggccgaaattatgacagagagagaaatataggatagcttctctgaataaagcctaagcctggggacaggaagtctacagtgtgccatatttctctcctttccttctggtagcccctgggggccattgtgaaatctccagggagtccaggagcacaggatagaaaccatgacatgggaggttattgtgagattaaaggatgtaatatatgtgaactagtaatatgcaaactttacaaatgtaagattcagtattattttactttctatcaatttaatgtattttaaagtagtcatcatcttttcccaatgtattatttattccacatatttgaagcaccatatcatatcacacttatccttaattgtcttcaggtttgcagtatttaaattaaatcactaattcaaattgaaaaatgagaggaactattagtttgtagaaatgtacttattactagattaaagtgtggcaattccagttttttcacgatcaagtgactatgtggtataatatgttttcatcaaaaggctgcatgttattatgaatttttaaaagagtgtgatagtcggctccttttttaaatttaattttaattgaaattaattttaattttaattttaatttaatttaatttaattccaaaatattttctttaaataaaatttgacatcatcatagaaaattatatgatatcaacaaacttcttttctatggtaatattactgtatggtaagtttatatctcattatttctgtgattgctatctgcgctttattttattttctcaagaaaattgaccattttcactaataatataatttactttaagtaaaggataggctctgcatatattaacagagttgtttgagttccagctttcattgaaatgatttcctgagaattgattgcatgccggatgctaatctttactacaatagctgaaaattcacatttcaatatatctaacagcaaatgatcagactgctacccagacagtgtgattcatctatagccatgttaggctgaaagtataaataaatcaataacacacactggtgataaggaaatgttctcaaaagtacatgaaagaaaacaagattatttcataaacaagtctatatattcacaacaaaggagaaagtagaagtttagattattataataaaaaaggcatctgctttatgtataattaaatagtttttctatgagtctgtaaaaacttttacacgaataattgccttatttttcctttgtagttatgattacttaaatatcaatttattaaatgcctgtcctgtgccacacctatattcagtgttagaaagatgaatgagggattataactgaacttaagggtgagataaagctgtgggcaaatatttccagtaaaatgtttgggtgttacgtaatactggaaatctgtttaagacaagaagtataacagcggaaagatggactttctgtggtggaggctttacaaaggaagtagagctttagtagggttttcaagaataaatagaaagtgtgaaatgacaaaggatgggccagagacattccagattgaggcaacaatagtcttcacagtacagatgtggccagagtgctttctgctcggtatttgaaaaatgtcttatttctctcttctatgattcaatttattggctgattattctgcccaagccaaaaaatatgtataacttctgtttatgttaatccttgtaaatccatctctaatgcacagagagatgcacgtggaagaaaatgtgttagatcagttttcagatttgactgtacaaaaacttgggttctaaagacatgtctgtggagctgtggaaggaaaagctgcatgaaggctttcctgattccctgcttcaaccagaacagtctcactttaaattggttttaatattgagatttctcatttggaataaacaaaaacattgaattgcaaaaagaaaatatgtttaactgaaatctcctatcaaagacagccttgtggtcgcttttcttgtttaatctcttgtagatgacagaaaaattgagagcttgtttatagacttgggaacacttaggctttgaaatccatatttacttacttgaaggtcagtcatttttgccccctgatgattttagaaaatgtcagggaaacaggcacagtaattgatcatattaggatggagtgaatccatgaagaattgacagcttgatctcgaaagctgtagtgtatgtatgaggatttgtagagaagtagaaaataagtaaaggcctggagaaagcagagtaaacatagagtagaacctgtacagagtcaaggactggtacactggtctcaattctactctttataaacaaaataaacaatggaaagttacggtttaattcctggattacatgattgttaaaatggaaggatagtttttaacaagaaggtacatttaaacaaacaaggactccagggtactcagattcttcatctgcctattttactgtctatttcatctatttctgggaacattatgtacagaaaatataagattaatccaattttagcatgtatcagaatcacctggtggatttgttaaaacatgaactggtaggccttgtccctggaatttctgattcagtaggtttggggtacgcgttaagtattggcatctctcgttaagcgccaggtgatgctgctagtcccagaactaactcagagaatcactgagataaacaaactgtataaataaattcctggaattgagtgtcttcttcaaataaaaacaaaataactcccatttttctgcccaaagagttgtgaaggcctttgttattgaaaacattaaatgaattgttaaaaaattaaaggtttaaacattttgcctaaatgaatattatagtgctggctacatttattttaatgcatttttggggatcgtacaacatctgctactggtatttcccacaaaatttgacctgtgtttcttcaactcttaggtttaccttagtctacaacttttgctttcacccgcccgtcatgtgaattttaaattttacattttgattttcaagttgaactttcatgttgaactgcttatgcttctcaaattgctcctttttctgcaatttaagtataatacaactggatgaaagaaggagtctcttacaaaatgtagctcatagctcataaagatatttgcaaactcaccttttttaagaaacaacaaatgtaggcttttcaataaaatacgtgaacttgagctctttataaaacaccacttgaagatcattgactttgaaacaaactaattttactttattgaatacctttttcccttcttcaaagatttccaatgctgtatattgattgttctgcccttttcaatgtcattttgtttttcttgctgcaaaaccatactctgagttacttaaattgtatttatcattcccagtattatttttttctttagcacaaacccaaacttattaagaatgctgtgatgttaatttcagaagaggatagcactaaaggcagaataattctgatatccaaatatttttataaataacatttgaaaaacagtatatattttggtttagtctactattaatagaggaaagttatagggaaacatattttgttctaataagaaagaatatctaaaaaaacagagcaggaaatcaattaaataatttgctgatactttcataaatgtcttcaaattatgttgtgattaatacttataagaactatttttcaggaggttccagaatagagtgagtgttcatctgagaactcatctgatccccttacagttctaacagggactttatatgctaatttttctcctaatgatggttttctatgtaatgtaacaagtcttaaagttttcttaaatattcatgtattaaagtgtataaaattccttggagtgttttattttagagactttttcattaatagatacaattttgttgattatagtttaaatggaagggatataagtcaaagaaatattattctcaatatgaattatgaaaggagaacaactttaaaaatacttcataatgaagtaagaaaaagagtacatgaaacatcttttgggtttaaagatatgaacaagtgatttctggtgatttttttctttttaattgcaagtctgtttggctatttctttggcttctgagcatctcttaagagagtgaatgaaaaggtaatcattaccctttagaggtaaaaaaagtctctgcaggtttcatagaatctatttgatttcaataagcattaaaatgtgttgtaattttgcagggtatctcattgaatgtagagccaagattgattctgttgagagctcaactagatgaaaaacgtagccagtatgaaacactcttaactggctcacatccttgcagtgggactatcacacacccaggcacccttacttgcggtaactggctactgattcagcaactgaatgagagaaaaagattcttaatgaacctggatcagagaccagattgctgaccagctcctggagttaataatccatcatatgaagtaaacacataaccatcactgaagttagagtaatgtaagcgttgcacctgacagcagtatggtgtagggagaatgagtgcagttattcctggcaggtttgtactggaatcttagcctagatctttactttgactttatgccaattatttaacttgcttttgtcactgaaaatagaaacacaatcaagacataatatctaccttccctcaaggaatttatggaaaacatagtcagttgttgatgctgtcaagttattgatattgtgataaatattatgcacaattacaatagaggtttgtagagctacggtaagaatagtatagtctgcccttggaagccacaggagggttgcctaatgaaagagatcagggaaagtttcctggaggatgggacatcttagctgaaaatagtaggaaaagtagaagcaatagctctttagtaaatatgcattcagtgcttgtctcttacatgtcaaacactcagataataacaacataaatgaactgtttagtaggacaattccaatgcaatagaaaatcttactatgcatcttccttcagacgagaacatagatgtttagggaggtcttataagatcattccttgtacagtgccttgaagctgagtggggagtcaaagttaacatttatctaaccctgtgtagtgctctacagaatgttagaatagtagatttgaaagtcttttctattaagattatattgaagctttggaaatgaatgagaatgctaattgatcataggatgaaggggaaagaaatctgagcattataccagagggattcccttcccataggaagtaagaatatgaaaaaggagctcaaaaaataagtggaaaaactcgaaaaaggaagaatgttttcaaaagagcatagtcaataggagtagatagtccataagttaaaatggtaataaagttctgatggatttatccttttgcaatttactagttgtattcatccattctcatgttgctacaaataaccacctgagactgggtagttcaggaagaaaagaggtttcattgactcacagtttcacaggcttaacaggaatcatgactgtgaggcttcaggaaacttacaattcgggcagaaaatgaaggggaagcaagcatgtctcaccatagccaagcagaagagagagagagagagagtgaaatggggcatgccaaacatttttaaaccatcagatcttgtgagaacttactcactatcatgagaaaaacaaggcggatatctgcccccatgttccagtcacctcccaccaggcctctcttgcaacacatggagattacaattcaacatgaaatttgggtggggacacagagccaaaccgtatctttctgccactgggtcctcttaaatctcatgtccttctcacatttcaaaaccaatcatgccttccaaacaatcccccagtgtcttaactcattccaggaataactcaaaagttcaagtccaaggcaaatcccttccacctaggagttacttctaagatacaatggaggtacaggcattgtgcaaatactcccattccaagtgggaggagacatggatctcctttgattccatgtctcacatccaggccacactgatacaagaagtgggctcccaacatcttgggctgctcttcccctgtggctctgcaggatacagccctttggctgctttcataggctggcaatgagtgcctgtggcttttccaggtgcatggtgcgtgctgttggtgggcctagcattctggggtctggaggacagtggtctttttctcacagctccaccaggcagtgccccagtggagactgtatgggtgttccagcctcacatttgccttctgcactgccttaggagaggttttccatgagggctccgcacatgcagcatacttctgcctggacatccaggcgtttccatatgtcatctgaaatccagacagaggttcccaaacttcatctcttgtcttctgcacacctgcaggcccaacaccatgtggaagccaccaagacttgaggcttgcaccctctgaaccaatgatctgagctgtacattggtttcttttagctatggataaaactggagtgctgggatgtagggtgccacgttccaaggctgcacagagcagctggcccttgggcctggcccaggaaacaaatttttacctgctaggcctctgggcctgtgatgggaggggctattgtgaagatctctgacatgccctgaagacatttttctccattgtcttggctgttaacatttggcttctcttcacttatgcaaagttctgcaggtagcttgaatttcttccaagaaaatgggtttttcttttctactatatggtcaggtcacaaatttcccaaacttttatgctctttttcccttttaaacagaagttctaatttcagaccatctctcaggaaggcatatgactgtatgctgttaggagcatccaggtcacatcttgaacgatttgctgcttagaagtttcttccaatagatatcctaaataatctctctcaagttgaaagtttcacagatccctagagcatagcacagtgctgccagtctctttgctaaaatatagcaagagtgacctttgctccagtaaccagtaagttcctcatttccacctgagatgacctcagcctggaattcattatctgcatcactatcacccttttggtggaaacaattaaacaagtatctgggaagttccaaactgtaccacatcttcctttcttcttctgacccctccaaattgctccagcttctgcctgtttcccagttccaaagtcacttccacattttcaggtatctttatagcagtctcccactctgctggtaccaattttctgtattagtttgttctcacactgctataaagatctacctgagactggataatttatgaagaaaagaggtttaattgaatcacagttccacaggcttaacacaaatcatgactggaagatgtcaggaaacttgcaattatagcagaaggtgaaggagaagcacacgtcttaccatggtggagtgcaagagagagagcaagggtgcagttttaaaccatcagaactcatgagaactcactatgatgaaaacaacaagaagaaaatccacacccatgatccagtcacctcccatcagacccattccccaacatggggggattacaatttgacatgagattaaggtggggacacagaaccaaaccatgtcactagtagtgcttggtataagaatattcattaggctgttgagtgttaaagcccagaaatgaggcattagtgggtgaatgttgaaagcgggagctgatgcagtaaatttagcccactcttgctaaaattgtcttggtggagctatagatggaggcagcaaggtataaaacaaatattcatttgtctgcttgtttgtttgaagactagagactttttaaggaattgcttctcttgttattgttaaaccattttgttataaattttatgagatctaatgggaatggtaatatacagcctagaatacgaatttcaaaattataaatataatgattgaatgttatgtatgaacactcagaagaattttgagttttgcccttcatgttaggaaaaggtgtaatttcacaatattcccttcaaagattaaaaagactgggtttagagtattgtattaccaagtggagggataatctttttttttccctttccttttgtgctgctcttccaagatggcattcagaatttgaatttcaccagtggacacttgttgattctaatagtccctttctttttttttttaaattttatttatttattattattatactttaagttttagggtacatgtgcacaatgtgcaggttagttacagatgtatacatgtgccatgctggtgcgctgcacccactaactcgtcatctagcattaggtatatctcccaatgctatccatcccccctccccccaccccacaacagtccccagagtgtgatgttcctcttcctgtgtccatgtgttctcattgttcaattcccacctatgagtcagaatatgtggtgtttggttttttgttcttgcgatagtttactgagaatgatgatttccaatttcatccatgtccctacaaaggacatgaactcatcattttttatggctgcatagtattccatggtgtatatgtgccacattttcttaatccagtctatcattgttggacatttgggttggttccaagtctttgctattgtgaataatgccacaataaacatacatgtgcatgtgtctttatagcagcatgatttatagtcctttgggtatatacccagtaatgggattgctgggtcaaatggtatttctagttctagatcctggaggagtcgccacactgacttccacaatggttgaactagtttacagtcccaccaacagtgtaaaagtgttcgtatttctccacatcctctccagcacctgttgtttcctgactttttaatgattgccattctaactggtgtgagatggtatctcattgtggttttgatttgcatttctctgatggccagtgatggtgagcattttttcatgtgttttttggctgcataaatgtcttgttttgagaagtgtctgttcatgtccttcacccactttttgatggggttgtttgtttttttcttgtaaatttgtttaagttcattgtacattctggatattaaccctttgtcagatgagtagattgcaaaaattttctcccattctgtaggttgcctgttcactctgatggtagtttcttttgctgtgaagaagctctttagtttaattagatcccatttgtcaattttgtcttttgttgccattgcttttggtattttagacatgaagtccttgcccatgcctatgtcctgaatggtaatgcctaggttttcttctagggtttttatggttttaggtttatcgtttaagtctttaatccatcttgaattgatttttgtataaggtgtaaggaagggatccagtttcagctttctacatatggctagccagttttcccagcaccatttattaaatagggaatcctttccccattgcttgtttttgtcaggtttgtcaaagatcagatagttgcagatatgtggcattatttctgagggctctgttctgttccattggtctatatctctgttttggtaccagtaccatgctgttttggttactgtagccttgtagtatagtttgaagtcaggtagtgtgatgcctccagctttgttcttttggcttaggattgacttggcgatgcgggctgttttttggttccatatgaactttaaagtagttttttccaattctgtgaagaaagtaattggtagcttgatggggatggcattgaatctgtaaattaccttgggcagtatggccattttcacgctattgattcttcctacccatgagcatggaatgtccttccatttgtttgtatcctcttttatttcatcgagcagtggtttgtagttctccttgaagaggtccttcacatcccttgtaagttggattcctaggtattttattctctttgaagcaattgtgaatgggagttcactcatgatttggctctctgtttgtctgttgttggtgtataagaatgcttgtgatttttgtacattgattttgtgtcctgagactttgctaagttgcttatcagcttaaggagattttgggctgagacaatggggttttctagatatagaatcatgtcatctgcaaacagggacaatttgacttcctcttttcctaattgaataccctttatttccttctcctgcctaattgccctggccagaacttccaacactatgttgaataggagtggtgagagaggacatccctgtcttgtgtcagttttcaaagggaatgcttccagtttttgcccattcagtatgatattggctgtgggtttgtcatagatagctcttattattttcaaatacatcccatcaatacctaatttattgagatttttagcatgaagcgttgttgaattttgtcaaaggccttttctgcatctattgagataatcatgtggtttttgtctttggttctgtttatatgctggattacttttattgatttgcatatattgaaccagccttgcatcccagggatgaagcccacttgatcatggtggataagctttttgatgtgctgctggatttggtttgccactattttattgaggatttttgcatcaatgttcatcaaggatattggtctaacattctcttttttggttgtttctctgcccggctttggtatcaggatgatgctggcctcataaaatgagttagggaggattccctctttttctattgattggaatagtttcagaaggaatggtaccagttcctccttgtacctctggtagaattcagctgtgaatccatctggtcctggactttttttggtaggtaagctattgattattgccacaatttcagatcctgttattggtctattcagagattcagcttcttcctggtttagtcttgggagagtgtatgtgtcgaggaatttatctatttcttctagattttctagtttatttgtgtagagttgtttgtagtattctctgatggtagtttgtatttctgtgggatcggtggtgatatcccctttatcattttttattgcgactatttgattcttctctctttttttgtttattagtcttgctagcggtctgtcaattttgttgatcctttcaaaaaaccagctcctggattcattgattttttgaagggttttttgtgtctctatttccttcagttctgctctgattttagttatttcttgccttctgctagcttttgaatgtgtttgctcttgcttttctagttcttttaattgtgatgtcagggtgtcaattttggatctttcctgctttgtcttgtgggcatttagtgctataaatttccctctacacactgctttgaatgcgtcccagagattctggtatgttgtgtatttgttctcgttggtttcaaagaacatctttatttctgccttcatttcattatgtacccagtagtcattcaggagcaggttcttcagtttccatggagttgagcggttttcagtgagattcttaatcctgagttctagtttgattgcactgtggtctgagagatagtttgttataatttctgttcttttacatttgctgtggagagctttacttctaagtatgtggtcaattttggaatcggtgtggtgtggtgctgaaaaaatatatattctgttgatttggggtggagagttctgtagatgtctattaggtccacttggtgcagagttgagttcaattccttggtatccttgttgactttctgtctcgttgatctgtctaatgttgacagtggggtgttaaagtctctcattattaatgtgtgggagtctaagtctctttgtaggtcactcaggacttgctttatgaacatgggtgctcctgtattgggtgcatatatatttaggatagttagctcttcttgttgaattgatccctttaccattatttaatggccttctttgtctcttttgatctttgttggtttaaagtatgttttatcagagactaggattgcagcccctgcctttttttgttttccatttgcttggtagatcttcttccatcctttggttttgagcctatgtgtgtctctgcatgtgagatgggtttcctgaatacagcacactgataggtcttgactctttatccagtttgccagtctgtgtcttttaattggagcatttagtccatttacatttaaagttaatattgttatgtgtgaatttgatcctgtcattatgatgttagctggttattttgctcgttagttgatgcagtttcttcctagtctcgatggtctttacattttggcatgattttgcagtggctggtaccagttgttcctttccatgtttagtgcttccttcaggagctcttttagggcaggcctggtggtgacaaaatctctcagcatttgcttgtccgcaaagtattttatttctccttcacttatgaagcttagtttggcttgatatgaaattctgggttgaaaattcttttctttaggaatgttgaatattggcccccactctcttctggcttgtagagtttctgcctagagatccgctgttagtctgatgggcttccctttgagggtaacctgacctttctctctggctgcccttaacattttttccttcatttcaactttggtgaatctgacaattatgtgtcttagagttgctcttctcgtggagtatctttgtggcattctctgtatttcctgaatctgaatgttggcctgccttgctaaattggggaaattctcctggataatatcctgcagagtattttccaacttggttccattctccccgtcactttcacgtacaccaatcagtcgtagatttggtcttttcccttagtcccatatttcttggaggctttgctcgtatctttttattcttttttctctaagcttcccttctcacttcatttcattcatttcatcttccatcactaataccctttcttccagttgatcgcgtcggctcctgaggcttctgcactcttcacgtagttctccagccttggttttcagctccatcagctcctttaagcacttctctgtattggttattctagttatacattcttctaaatttttttcaaagttttcaacttctttgcctctgctttgaatgtcctcccatagctcggagaaatttgatcgtctgaagccttcttctctcagcttgtcaaagtcattctccgtccagctttgttccattgctggtgaggaactgcgttcctttggaggaggagagacgctctgctttttagagtttccagtttttctgctctggtttttccccatctttgtggttttatctacttttggtctttgatgatggtgatctacaggtgggtttttggtgtggatgtcctttctgtttgttagttttccttttaacagacacaaccctcagctgcaggtctgttggagtacccggccctgtgaagtgtcagtctgcccctgctggggggtgcctcccagttaggcttctcgggggtcaggggtcagggacccacttgaggaggcagtctgcccgttctcagatctccagctgcgtgctgggagaaccactgctctcttcaaagctgtcagacagggacatttacgtctgcagaggttactgctgtctttttgtttgtctgtgccctgcccccagaggtggagcctacagaggcaggcaggcctccttgagctgtggtgggctccacccagttcagttggagcttcccggctgctttgtttacctaagcaagcctgggcaatggcgggcgcccctcccccagcctcactgccaccttgcagtttgatctcagactgctgtgctatcaatcagcgagactctgtgggcataggaccctctgagccatgtgcgggatataatctcctggtgtgctgttttttaagccctttggaaaagtgcagtattagggtgggagtgacctgattttccaggtgccgtctgtcacccctttctttgactaggaaagggaactccctgaccccttgcacttcctgagtgaggcaatgcctcgccctgcttcggctcgcgcacagtgcgcgcacccactgacctgcacccactgtctggcacttcctattgagatgaacctggtacctcagatggaaatgcagaaatcactggtcttctgcatctctcaccctgggagctgtagactggagctgttcctattcggccatcttctaatagtctctttccagtgctatctctgtgtctagctaagaaaataggtctcttcctagaaaattgcttttaatgaaggagaggtatgaggtaaaagtagggacattttgctgtcaggcagagcttgagttggatgtataaaaaaagagctggaatagtttttcccttattgccactttccatttacatttgttcccaccattcaattattctttttaaaaaggctagaggaagtgatggaaaaactgaagataataaagacacaaaatgctgaggatggatatttgtgaaaatacataatagcaaccaattgtggggcaggagggaagtcagagaacgctggggtctgtctctcctactctgccacagcatttttgaagcagcatttagtaatttctgcacagggggtgccatacttagacaactccttatgatttttcaatttctcattatcttcaagaagtgttccagaaaagaatctagaaggaacactatcaaagataatgggttacagttttccacaatgggtaaatagcctgagttttcagattaaagaatcacactgaatattgagtgatgatgtggtttggctgtgtacccacccaaatctcatcttgaatccccgtgtgttgtgggaggttcctggtgggaagtaattaagttgtgggggcaggtctttccgatgctgttctcatgatagtgaataagtctcacaagatatgatggttttatacaggggagtttccctgcacaagctctcttctcttgtctgccaccatgtgagacatgcctttcactttctgccatgattgtgagtcctccccagccatgtggaactgtgcatgcattaaacctcttacttttgtaaattgcccagtcttgggtatgcctttatcagcagcatgaaaatggactaatagaagtgggatttttacaaattcagttagatgacccagaaatcctcttttgcataaattagttttatctggttttctgccatttcagactttgctaagctagtcttcctgagaaatgtcctaatttttactcaccaattgtctgtggatacctctgttttgcacaccatggtcaattcatattcatttaaatatatttaataatttgatttataatgtgtttcttatgcatttaaatatatttaataatttgatttttaatgtgtatctcttatataataatgattttgagcataataaaatagattactctttctttcttgttccaacatttgattcttgcattagctacaaaaagttagttgagattatttctcagcaatgtagagctactttgctgaaagactgctgtatctttttaaaaacttaatccaaagaaaccaatagatcataagaaataaccaaatataaagtatctgtctaaccaatagacaaacctaattagaatactgcctgcatgcttatgtaagtgttggcattcagaaaacaataccccaaagtatgttgctttggcatgctgagcagtttaaactaaaagagattgaagtcacctcagatataaaatctttctcccatctcctgctctcctgtcttctgctcctctttctccctcaaagaaagtcatagaaaccagagttcctcttatgcaaggtgaggcataaaaactagaacccagtccaggcaggttggctcacacctgtaatcccagaacttggggaggtcaagatgggaagatcactggagactaggagttcaaggctgcagtgagctatgatcacatgactgcactccagcctagataacagagcaagatcctgtctcagaaaagcagaagcagaagcagaagaaggagaaggagaagaagaagaagaagaaggagaagaagaagaggaggaagaagaagaaggaagaagaaggaagaagaaggaagaagaagaagaagaggaaaagaagaagaagaaggaagaagaggaagaagaagaaagaagaagaaggaagaagaagaggaagaagaagaagaggaagaggaggaaaaggaagaaggaggaagaagaagtgaaggaagaagaagaggaagaagaaagaaggaagaagaagaaggaagaagaagaagaaggaagaagaagaggaagaagaagaaaaagaaagaagaaagaagaagaagaagaagaagaagaagagaagaaggaagaaagaagaaaagaagaacctgcaactcttctgccccaaagcaagtggtgaaacatagaaaggtcactggtatggtttggctcttttctccacccaaatctcatcttgaattttactcccgtaattcccacatattgtgggagggacccagtgggagataatttgaatcctggtggtggtttcccccatactattcttgtggtagtgaataagtctcataagatctgataggttcatcagggatttttgttttgcatctttctcattttatcttgctgccaccatgtaagaagtgcctttcacctcctgccattattctgagatctccccagccgtctgtaactgtaagtccaattaaacctcttgttctccccattctcagttatgtctttatcagcaacatgaaaacggactaatacagtcactttctccattttcttgtctcccttgaggatcctcattccggaggggtcctgccccatacctgggaggaaggagtgctatacagagaggccaagatgaatctgaagagaggcctcactgagtccttcttcagtcgatcaccgttagaccaatcccttttgttcaatcatatttctgtctttcttttttttttttttttaaatcaagacagagtttcgctcttgtcgcccaggctggagtgcagtggcacaatcttgcctcactgcaacctctgcctcctgggttcaaacaattctcctgccccagcctcctgagtagctgggattacaggcgcccgccaccatgctcggctaattttttgtgtttttagtagagctggggttttaccatgttggccaggctgttcttgaactcctgacatcaggtaatcctcctgcctcagcttcccaaagtgctgggattataagcatgaaccaccacgcccagcctgtttaatcagatttctatagagctgtccattcttcactaaaccaaagcataaatgcaatttttcctgagtctttgagtttttatttctgacagcttccctgtcacataaaactttgatttgaaaaatttggtaagcttttatcttcctaatctgtcttttgctataagagtatgactgtgattcttatcatgggtgaggaaaggtatcacatctttccactcctacataaggtatgatatacattttcctctttggtaaacaaaatttccgaaagacaagcaaatggactgtaatgatattctatgactataccacttgggagcaaagttggccatataggaaaggctgaatattaggatttattaaatttatttttaagtgttttaattctgtggaataattggtgtttaggcaatttatataccttatattaatcactcataaatctcctagaaaattaattttattagacaaactttataaaggaggaaagagtaattaaaatactattaatgaaaaggatcaagtgaacaagataagcaaactttgtttcctctgccccaagtcaaactaaaatattctgtgttataaaaagagtataggggagggaaaattttctttatcttgtatccatattaggttcatcagggctctagacagagaaaaggcagattaacaagagaaaaataaacagaactttattgacacatgcatcactcttacctgtgagagcactcagtgatgcgagcactcagtgatgagtgatgatggttagaacctaagcttataaagcatcttagcaaaacaatcattgttgtgtagggaaatgacaagacaaaagaaaaggattttgagcttctaggggcagcatgttgtgggaaggcaaatatgtaaggaaactaaccatagataatggtcagttaataaagtttcttttgttgattcctctgctgctatctcaagttgataagggtctaaagttgtctcaagagattagcttctatccttcctggtagagagaggaggggggcgctgttacacatctgtctcttctttggcaaagaggaaggacagaggttttccttaaatatgctgcttctcaatttcattcctctcacaataatccttatgccaaagtggcatatttcgggggtgacatatattgttaccctttaataaattcatgctgcaatatgtttataataatcagtacatatttgttcattactttttaagtactcagtaaaaaaaaaaaaaactgtaagaatattaaaatatgaagggcaaaatgcctccctttaaagagtcctaaattcagctgtggagctaaacatatatatcttaagatatgtcagtatgtatctttcttttccgttttgaatgaaaaatttcaacatatgatgaagtagagagggatgagatgagatctctgcaggtcctgggtctgtggtgcttatgaacattttcctcctttgcctggcccttctgtgctctgaggagggggaggctgaccccttcacctgtgtttttcagcaccacccccacacttgtttctagcaatagaaggctccaatggagatgggggtgagggggcaagagaatccttagcgtgtttctccctctgtttcagagcttttagcttcaaacaacatgttaacatctggccttagttgctacaacaacttatttttagttttagttttcctttaacaattgaaaagaaattacagagatttactataaatttctcagtaggcatctggaaaaaaattaagatattgtcctcataaccaaactattattatcatatcaaagcaaagtagcaggatttccattgaactctgttttagttttttaaaattcctaactctcctacaattctgtttataattgatatatttgaatcccagtctaaagaaagtaaagatcccagtcacattgaagtatattttatgcaattggtacattcttattttaaaataatgttattgtttatctgaaattcaagcttaattgggtatgtaatgtttttattcattagatttaggagtcatagccatgtttcacttggttattgtgcttttataggtcataggtaaaatacaagccctgggtcagtggctaaaggtaaatatgatgagctaatgaagctcacattataatttactggagctcacgttataattgatggtaataaacaggcaatacacaattaaatcaacaatatgttgataagtgctgtaaacagagaaaaaaaagtagatgtgacaatggtaaatgtgcactgggaggtcagggacaacttctctggtgaccaagtgacattgccctgacagctaacttacagaaagcacctacacatgtgcaaatattatgcttcaccttcaaaggttaaaaaatatatatgacgtaaagtttctatgaaagccaaattataggtcacatcactttttcattctcagaagaagcgattgaaaatgtaaaccccgtgaggtgggaatgcatgtagtctactcagcaaatgtaaaaaactgaatataagattttgatttgtagggtatcttgagtaaactagaagggtattttgagataaagtcaaagaggtagataggtgccatgttatttaaaggcttttatgacataaggtggaaattggattttattctacgcgtgctgagaagcttaaatataggagaattagatgaaactgattcctcttgcaggagagccacctggctgcagaagattgtcagagatcaagggtaggagccttgggctggttagcagggcatgattatagtaagtcaggtgagagatgtaggtggttcccaccagagttgtagcagtggagatagaagagggatggatttggaatgctgcttggacaaatacttcctggccctctagggtgattcaactagctctgcttgctttttctttatatttgcaaaagaattgtgagtgaacttgtatcacaacatctaaaatgctatattaactttcctgattatgttgtttttttctcctactagactataaaccccttgatgacaaaaatagtgtgcatttcacagcatcttgctcatattcagtgctcagtgcattctggagaggaagtaatttaatgagattttagtttacattccacaaagaatttccaatgaatgtggcttctacaatcctgttaattaaaaggattgcaacaatagtccaaaaaatacacatgatatgtaatctggctattatagaaactttaaacgctattcttttaacctttgaaggttaagcttggttcaagagctgcctggaatcacagcaaaagtaataaaacacacaagtttttagcctctttaagggaaaatacatataacttctccaactttcctttaccaaatcatatgactgatattgaactattcttttctcctttgctgcttttgcaatcaaagccactcccattatcttggtaaagaatgtattctatgattccttgactcctataagcttaatgacatcagcttttaaaatgttgacagaacaaacaaagtgcacacagctgcaacattccctctgcctgcagttaggtgcttttatgcttttactaaacacacacacacacaaacacacacacacacacacacactcatactcattctacttcatttcaatttgaactacatgtggcttactacgtctcagttaatggcaagcaacataacttgttggcttttataaaagttaattattacttgtatattaatttgtttaattttgtttgcccctaaacactctgagaaggaatcattgctattttgttagattttctgctacctctcacatgagcctgatacttggatttccattttttaatgaataagtaaccgatgtaatgaactaaataataaccttgttgaacctaatgttatgaagtcaagtgtgtttgtcacccaaagaattttaagtggctggatggtgagaagagtcccgttagagtaatgcccatgaattataacacccactagcagcaaaacaacacgtgcattctagagtggctcaacctaatgcgtgaggcatttgggaaactcttgagaacatactcacaaaagagtagtattcagtttatgattatttatcttagagcctctttgtgattacttatttggtaaatatatcaattttatagaattattcaacctggcttctctataattattaattcattatttagcattcccatttgttgtaaaatactctctactcttccctgaaactgagttattacgttaaggctcattgatattttattcctcataggcaggatcgtgagggcattaggaagaacttgggtatttctttgttagagatggacaaagtagttctatatacaacaaggttatttgctggacccagccctacattacattgtatgatttttgcctcgtcagctcttattacagtgactatccccttgtagagagatactcaagtattatttgttgtaacttgaatgaagaaacagcacttgagttggaaataggaaaaaggcaactcttcacagtttgtgtttatgtgcccagaaatgcttgttgactacacacaaacaccatgctgaaatataatcatccaacgaaataaagctaagctgagataattaccactgggatatttttagtcaataataattatatgttaaccaactggtattttctgccaaacgagagatggcatttctgttgatgacacgttgcatgtgttctttctacagctgtatcttcatgagtcaacaggctttctctaagtctctctgcaataggaattaacaatcagaccatcttgctcttttttttattgccctttttgctccacttgatgtaaacagggatactggccatttcttaaatgatttttatttttctactatttttctcagcataccaattttcccttcaatactcaagtttaacgttgagagagaaatgaattttgcccccctcaaagcctctgtttacatttagttaatgagataatttgtttaaaggctaaataccattactcatatgctaaagtttcacaccatgtagaaagtttatagaaacacattaaactgaatgccaaaactatctagacctcactaaaaattgggatctatgtgcctcattttagtgaagaagtttgaattaagagagatcacatcactctctctgacatccagggtgaagtctcagcattatggactccatcctcaccgtcatcttgtactagttaacttttccctaactggtaacctacacataagaatattgcactttttcattatgactgacagagatcctagtattggtgtatggagactattagataaaaatcttggcattaaaagcaggagaaggaatatggaaaaatgcagagctgtcaagaaggctaatgcatataggttttaagaaccacatgaaggtactacttttggaacacagtggaaatcaaatgcatgacttatcaacataatcatttttggatagtatgcactacttgaacatatttaactaatccaaagtcttccaaggcttggatatacactggtagaatgatgattaacaacaggacttatatctgtgctttcttatgactccaataaatatgaagtccttactactggacactgattgtgtaagcagtatagcacccatagagagtgatcacaatctgagatcattctatcttatggtagctaaaacagtgcacattcaaggatatatgagaatacactgagtaaataccagatgtagaaggaaaggattttgaagtagtatgtgaaatggctcacagcacatgagttggtgtcagacgaatctggatttgagacctgggtcctcatctgaataactctataatcgtcatcagctaagttctttaaagtacagtttccaaatttatacatctgaggtaccaatatccataacataaatataaaataaaaaagatgtttataatagtgttattttagcacatataaataagcatttattataattataaatatataaataatttgtccaagattcatttcattaaactgagaagagaaataacatattaaaaatatttatcccatttctccaaatcaatgggagaaaagtacaagatgagttgtgggggtggatagatgaggaaaagacaatgtctttacggtatttccagttcacttctttgtttgccttgctcagtgtaagtagatcttggggaattaaagagtcagctgatatgatgatttgtttgttaccagaacctcagcattctaaggagatatactattgacctagaagactggggcctgtgttctctcagtaaccacttgtattttccaggacaaataagttctcatcttctcatctgtataataaagagttggttcttatggtcattacggtcccttttaggcacaactatttgctgatataataacgtcatcttcaatttacttattctctgttgtcgatgggaaatcaattcaaagtctcgtatttttatgctttttttttgattattttgttttcttccccccgcaaagcctgaaattaactggcacagctgtggaattagtaaaacctactgaggctctagtcgttggtgacctttagttttaataagctgtgctgggttttattgtctataactagtttcttttaagtagatatgttcactttgatatcatattaatagaaaactctctaaaatatcagccttaacataaattgttgaactgcattttagagttcttactttttcattttttaattcttatatttcacaaataaagatgtatgctttcattaaaacgtgtatacataattacactcatcctcttaatatcacatatatataactaatatttttaagagcataagtggaaaacatgcaaaaccaagtgaatataatttatataggatattatcttcacaataatattggattcaggacagatgattagatgagcaagatattatagtttatagatcggactgtatttaatatagtttgtattttaatttcagtgtctgtgatttaaattacaatgaattttttaaaattgcatataaatgcattgttttagacagattaattctttatattcatagtcatcattaaatgagtttttcagtatggtgaaaacattattttttctttctatgaagatctttgtgtaaagatttccttcagttttatttgaaagaatccattaccttcaaaatagtcatattattttttctttgccagtataagaaactaaagttattgttatgatttgcatatttatattgaattttcctttgtcatttatattatttctatttatttaaaaagtatatgtgaataggctgggtgcggtggctcatacctctaatcccagcacattgggaggctgaggtgggcagttcgcttgaggccaggagtttgagaccagcctggccaacatggtgaaactgcatctctactaagattacaaaaattagctggacatggtagtgcgtgcttgtgatcccagctgctcgggaggctgaggcatgagaatcgcttgaacccaagaggtggaggttgcaattagcggagattgtgccactgcactcaagcctgggtgacagaggaagactgtctcaaaaaaaaaaaaaatctatatgtgaatagataagattaaataaaatatatctaatgctaataaatgaaactggtaaaaattgaacagcttatcaaagtctgaatgaccatcgaatgttttagtggtagactagaaactgaagccaccttccacttctgcagaaccatgacaaactgggatagaacccatggtcttttagcctttgaattccagttgctcttagaagttccatatcaggataaattgaggtatgaggagaaaggattgtattaaattcattaagggccaatacagttttctggctctgggaaccattgtgtattctcagagaagaagagagagagcattggaacttgttactttctctactacacagctcatagaaggcagaaatttatttgtttttgcataactacagaactcatcaaagaggtagatcaaattttcagacttgatctgtctagggtggtttctaggagtggcaaattataagctggtataccaagcatgaattggagttggctaggccaagtaagggatggtgatacattagggtacttggacagatgaaatagcacatatggaggtccatagatgaaacaatgaagtgtaatctaggacctgaaagaactttgtagttagttgaatgtatacattgaggtcattatataggggagatgaagattggtgccatgaagtgagataaaaattatgcagagattgaattatgcagtttcatcagagattggaaaattatgcagagattgaattatgccgttcatcaaatatataaagaaatttggaatcgattctaaaaactaggaggatacaacaaagtgttttaagtgagactgatgtaatcagattttcatttttttaaacttggatttgaaactagtagagccttagtgtcttagatcctcttaacaatgaaggacaacagtttattcacagacattttaaataagaatgcagatccccaaagaattgaaatgacttacatcacattcctcctaaaaatgtcagtaaaaagattgataaagcccaggtttctgttcttggaggtattcttttgagaatgtgagagatgttaaaattcttttttttaattagaaaatcacattctattataggctgctacatgtaatcaacctcaccaaaaaaaaaaaaaagaaaaaaaaagaaagggaaagcattactgaatgctacctgtcccaaacattagtgaaactgatggataacattttttaaaagtatttatcccagcataatacaattttctattatgagagcgaggtatagaattaaagcaactatcaaaatagcccatatcagatgcaatctttaccctgaataacaagactattaaaggataggagtctaaccaaagggacttttaaaagtgtctgtcatttgctgatggtggcacagattttattactctacaggtcagagggccacgtatttctctgtttatagtgaggtgggttttttttaatagtacatttatctttcttgaatatgggaaatccatacatagttactgtgttagaattcctcactaagaataattctcgataatcaacgctatcaggagttgagggtggcataagagagttcaagaataagatgataatttgatgatggaaaaataagtgagttctcctaatgcatacctcctatcattgtagacaaaagtttatgttctcaaagctgttttcacgtactacactcttcacctctatgtgatttgtttgctagagctgctgtaagaaaattccagagactgggtggcttaaatgaatgaaatgtattttctcatggtctgggtcccggaagtttatgatcagggtgctggcagcactggtgccctctgagcctgtcttcttggcttgcagacccccactcttctgcctctccccatggtcctgcctccgtgcatgtgcaccccagtatctctttttacgtgtataaatttcctcttcttataaggatgccagtcagactggattaatttccaccctaatgacctaattttaacttaatttctctttaaagattctgtctccaaacacagttacattttgaggcagtaggtttagagctttgacatgtgggtttcagaaggacacagttcatcccataataacctccaaagacgtcaatgctaaacagcctccatgagcttattaccaactcaaaaacatcgctttcttcccaggccttccctgtttgttttacttgactgattaatgtatgctgctctttgaagctcagtttctttctccagtgaagacctactgttttcccaccttcttctctaactcctactttgcactggtttacaactcagctcacaatattcccaagttactttatcagtaaaatgttttcaatagatgaaactcatagcaagtcaatacaccattttccacttaaatttgcattattttacattggattctaattgatccatacagctcgattgtctccccatctagtttgcagttgatgagaatgggaatgacacattatatttattttgtatcttcatatgtgttgctgtacatactatatacaatgatagagtgctgtgtatatattatattctcaaatgattcaatttgattcaatttctgatagtgaaatacccagctacctgattctgctggttttcaatgttactttaattggcgtgaatttccagcaattagctttccttcaccatacatactttataaccctctagactgctcaagttggctgggcctggtcttcctgacccagaccattggatgtttaagatcacattccaggcatgaggatggctgcacatctattacctcacagattgtcaagcttgattattactgatgtggatgattatctaggtgtccttatacctcagtgttccccctgtgccttttcaagaagagtattttacccagtacagaacttttttagaaatcaaggttatacaagcaactgtgctcatttgtgatcatcttgaaatccgtaaatactgtccgagtatattactatgttaggtgaaagatttgtgttgctctccacaaattatcaatgtttgtttacagaacatttgtgaaaaataatgtttggaaatgaattgctacgtgaagtaagtaaccagtaactcaagccatttctcccatgtggtctgttttaaaaatggaaattctgtaatctggcttcctcaccttggagtaatatacaaaatgtcaaaatgagaaaagggaccttggtagttgttgtgtctttcttgtttattctttcttgttaaatactcaaagaaagaaaaacagcatgcaatgtttgtagctcccattgtgttagctttttactgtcctgacatatgtcctaaagtttaaaaagcaataaaaggttgctgcttccacagtcattagctttcgttgctgcagtcaatcatccacagaggtcagagccgtatcagtttttcccatcctcattgcacaatccactctagccattgcactcatatatcattaaaggaaaaacgaaccaaggaaactaccgagactcaaaaatgaacttgcaatgtgaaaaatctcctatctccttatttgaggaaagatgctcctgtcacgctgagtaaacaataaaattataaggccaacactgtaaatggaagtattatcccatctattgatttataatgggttaattaattttcaagtgttcttatttgcaaaacatgatgtgaacattgacagaaatccttagatagtttaagatgaagtcacttttgtcttagtgacttgatcacttatacttaggccatagttaagaatctaataggattatttcagcagagtgttgccagattcatgtataaagtcaagaagtaaaagaaaaatataagttagtcatgtttgagttgggtgatgtaacctggaaacaaatctgactggactaataataacaagttaataaactcactgtgaacaaatcaattaaaaacctaggcattgttatatttatttgcatcttactgtctaactagactttagttgaaccacacttcatttcattttaattcaagcactcattgataatatattttgcatttcttagataatttcaaaaaaagatagtgtgccatagtcatattattataagggactagagttatattctaagtcttctgacattcaataaaattgttataattgggttagacatatatgaattacaaaacatgggtttgaaagtggtcacccaagcatgattaggaaaactgcatacaagtagtcttactaaatacaagttgtaccactccttgcttcatccctcagaaagaggcatgatgttgtcactgctgctcatcttcagcttccactttagtttctgactaattctgccctagcattttcttcctgtgcttttggctgtgattttccggttacttgaatttcttgtctgccttctttgagctagaattttcaggtttagtgtttgtattgttctgactttgtgtttgggaagactgctgccacaagtatgtcccggtgtatgtaattatattcttgaccaatgctccttgtctctgtccacataacctctgttgaatcccaaatgtgtacccttggcaagttgctgggtttagtgtgagagtcgatacggcaacatcacatagaaaaaatgttcacggccaatttctaatttgataatgtgatgaaatttatggatgctttcctcattaagatgttcatcacacaaacagctgcatataatttaaagacatattcatgcatatgaacttaaaaactcatggtttagaggtgtttttaatgcatttccctggagtttttcattgtatatgacttttttttttttccttcttttgtcccttggttatattaagctgcctcttaatacttagaaaagcagtgcttaagaaattggaatatctctttccataaatatgtgataaaatgtattgtaacttatatgatttattaaattgagtcacgcctgaagcaaatgcattattaagtagttaaaaaattcatgacatgtccttaacacactgagagtgccttagaggagttcattcatctgataaatatgtgtttaagaaaattgcttgaaatgaatctcttttatgagttttggtaattattgttcttatttaagacttagatatatatagcataaataacagaatgtgtttttcacatagggttgtggtttgtttttgaatgcaaatagtcagtcttttcttggtgggtatataataaaatgctttttttgcatcattaaaagttctcaatagtctatggtgtcctagaacatattatctacattgtatataactatgtttctgttttgagatttaaaggaacatatgcaatagcaactttatatgagatttgatttttcatatcagacttcagcctcaagcatttagttgaagaatgaagatcttaaattttgacttttctgtttttagccagacatgttcaaaataaaagtgctatttaaaaagaggtttgtttccatgtcatctgaaatagggatgttttaatttatgttatagtttgagatacaccaaatcaaaggaacaagcctgcctcaataacccagtataattttcctatggctgctgtcacatagagagcacacttttttttaagttacagctttccatccctttagcacttaatcatgtagagatttgtatcgttgattatgcataaaataatttgactaaatactctgaggcagtgtcggtgacattttgttgctgttggtaccacctcttgtttcattgctactactattagtaccatcatctttgataattactacaatttactgagtgctcgcattgtttctaacatgaagaaaagggctttattttaactatgttgcagataagaaactgagatctagtgattttaaataacacacacaaaagagaagtattgggtggataattatttctgtttctttttgtaatccatgtatgcaattcaacaacacacaataataatagtataaactatgatcaaaactcttgataggctttttataatgcgatcggacaacactatttaactttctcatttattatttatctaaactatttgaataatttcaaaatattctctgcttttcaggctacttgatttgcagcccaaataatctcaaaattgtaataagtcaaggaacatttttagcccgaattattaaaaaattgctttaattttgctttagaatcaactcctcactacccattgcattttagttttatgcgtttctttatcttctattgatggactttgtaatatattaatttatatgcttaaagtcccatttagctatagttttccttttgatttaaatgtaacttaaagagaggaaggaaaatttttatttcatcacaacttcttccaagtattttataaaaattctgatggttctctttactgaacttcttctaagtgtttcataaaaattctaatggttctctttactggcttgtattagcttgtactttctttgctgtaaggaaatatatgagatggggtcatttataaagaaaaaaaggtttaattggctcatggttctgcaggctgtacaggaagcatagcagcttctgcttctggggaggtctcatgaagcctccaatcatgatggaaggtaaaaacagagcaggacgtctcatatggctggagcaggagcaagagacggggaggggtgctacacacttttaaatgatatctcatggtaaatcactcattcactatcatgagaacagcaccaagaagatggtgctaagtcattcatgaagcaccacccccatgatccaatcacttcccaccacacgccgcctccagcactgggattacaatttgacatgagatttgggcaggaacacagatccaaaccatgtcatggctgaatttaccaaatcaactgtgaatggaaagaagtgaatgaatgctagcaagtaaatgtatttcagattaaatttttttagggaactagaagtaaattgccctgtttaaaaaattaatttataatggacttctagctttggcagcatgaagatgttgtcacattctctccaaaaagcaagtacagatgcttctagacttacaatcatgatatctacccataagtaaaaaaaaaaaaaatcttcagttcaaatatgtttaatacccttatacccaccataatatcaaaagttgtaggttgagagactgtaagtccagatgcttcctgacttacgataggattacattcagataaacccactgtagagtgaaaatgtgtatgttgaaccctagtaactcagggaccatctgtgtgatattggaaaaaaatagaaacaacatttcaaggcacatatgtcaacaaaaagcagaaaacgagttaataaaatttacttttgaaataaatgcaagagttgcaagttagaggagtatctgtggccttctttccaggtcgctgccatcttcactccccacgtcaatagagtcagcaagaatagtatttgtaacagcgggcattgaaaaccaacagtttcgaggctatgcatggggaacttcctcagtttggagtagcaagtgaaaacctatggctttgccagctaaaagtgagtacttaggtgggaacaactgagcaaaacatttgtgttagcacacagaggtcctggttgggggagcaatggaccagcaagaaagttagccaagagattctgaaaatgagcgagccatagaaggtctgagataaggtctcgcatatcactggctattagggaggcctgagagggatttgagaaacagaagctgaggaagacttgaggactcacttcaactttaagtgtgttttccaaaccactcactaataaatgtgaagtgggtagacaccttatggaaacaaagcctttgagtacatcctctatccaaataactgggtgatcactaaactatgaagacatgctggagggccaggctcattcctataatccctgagctttgggaggccaaactgggaggatcatttgaggccaggagtttgagaccagcctgggtaacatagagaagtctttccctgcaaaaacatttttttaaaatgtatctgggctagtggtgtgtgcctgtagtcctaattacttgggaggttgaagtgggaaggtcacttgagctcaggaatttgagattacggtgagctgtgatcaagctatcacactccagtccgggcgacattgtgacaccctgcctgtaaaaataaatgaatagataaatagacgcagggcagtattcctagaaaacaaggcataaaaatacaatagtaatggtaaaatacaattaagtagagtatcagtggctgggctacacatcaaagctaattttaacacacatacacagaaatataaactgcattccagagttggtatgatgcattttctaatatattaaattttcaaccacaaattatgtgatatccgaagaaacatgaaagtgtgaccaatactcaaaagagtattgagtcaatagatattgacactacatgggaccagatattggatttagcagaaaaaaaaaaattcaaaacatctactataaatattttcaaaatattgaaggagtgacatcagcaaaatggcggagtaggattcttgggcttcactctccctatagaaatccaatagcaacacaggaagtataccatcctaaatgtcccagaactcaggagtgaggctaagacttcccttggacccttggacttcaggacaaagaaaaatggaaatcaaatattaagacttcagatgtttcacctcgttgccctttctctaggccaacacagtaccatacacagagaattctcctggacccacagtttctacagttgggaaagttagttggaagcaaatcttcagttttcccaccattcaggcactctttacagaaggctcattcctattttgtcccacaggaaacattgggattacaagcaggggtggaccacctggggtcagttggcaaaaaagagcatttaggagcagctttaaaaaagaatagacaaacctttaactagacttactaattacaaaagagaggttattcagtaaacaaatcagaaatgcaaggcgaggcatcacaatttacaccactaaaatacgaagaatcataagaaactattattaacaattacacaccagtacattggataacttagaagaaatggataaattcctagacacatgaaagctttgaaaacaaacacaaagaaatagaaaactcaatagagcaataatgaacacagagactgaatcagtttaaaaaaaaaaaaaagtcttccactgaggaaaagcgcaggactggacggcttcactgctacattctactaaacatttaaagaagagataataccaattctcaaaccattcaaaaaaactgaagtataaacaatgcttccaaactcattttatatcccaaactcattaccacaacaccaaaggcagacaaggacactacaaggaaaaaaaaaaaaaaaaatatatatatatatatatgtgtgtgtgtgtgtgtatatatatatgtatatatatgtgtgtatatatatatgtatatatatatgtgtgtgtgtatatatatatatatgtatatatatatggcaacatcattgataaagatacattttttaaatcctcaacgaaactattagcaaacccagttcaagaacacattaaaagaatcatttttcacaatcaagtgagagttattcttaggatgcaaagatggttcaaaatatgcagatcaataaatgtgatgcaccactttaacaaaatgaaaaaaaatgagaagatgcagaaaaagcatttaagaaaactcagcacccttttcttataaaaattctcaacaattaactatacggaaaaaatgtacttcagcacaatatatgacaaacacatagctagtattattcttaacagtggctagttgaaagcatttcctgtaagatcagggacaagacaacgatgctcactgtcactacttctctctttctttctttccttcttttttttttttttttttttttttttttttgatacagagtctcactctgttgcccaggctggaattcagtggcataatctcagcttactgcaacctccgcctcccaggttccagcgattctcctgcctcagcctccagagtagctgggactacaggcacctgccataacacccagctaatttttgtattttcagtagagatagggtttcactgtgttgcccattctggcctctaactcctaacctcaagtgatccatccacctgcttcagcctcccaaagtgctgagattataggcatgagccaccgtgcctggccacaccacttctctttgataaagtactagaaatcagagccagagcagttaggcaataaaacaaaataaaaggcatactaataggagagaaaaaagtgaaattgtttctctttgttgataagatgatcttatgtgtaaaacaccttaaagacatcataaaaaaactattagaactgatcaatgaatgcactagagttgcaacattcaaaattaatgtgcaaaaatcagtagcttttctatattgcaataatggtctatcttaaaaggaaattttttaaaaaatctcatttacaatagcaataaaaaagttaaatatataggtgtaaatttaactgtaaaatacctgagtattagaccattcccacattgctataaaaatatattagactaggtaatttataaagaaaagaggtttaatgggttcacgcttctacaggctgtacgtaaagcatgatgctggcatctgcttgcttttggggaggcctcagaaaacttacaatcatggtggaaggcaaagggggagcaagaatgtcacatgatcaaagcagcagaagtgggaggtaccacatacttttaaatgaccacatctcataaaaacactcactattgcaaggacagtataaacaggatggtcctactcatgagaaatctgttcccataattcaatcacctctaaccaggccccatctccaacactggggactacagttcaacaggagatttaggtggggacaacatccaaactatatcaacttatatactgaaaactataaacattgaggaaagaaattcagggtaatacaaatcaatggaaagatatgccatgttcatggattagaaaaattgatattgtgaaaatgtttatgctacctgtcttcatctgttctgtgttgctattataggatacctgagactgggtaatctatttaaaaaaaaaagacgtttattttggctcagcattgtggaggctggaaagtgcaacattgggaagccacatttgatcagcatctgatgagggccttttacttcatcatgacatggaagagaaatggaaggggaaggaggcacacaaaagaaaggccaaattggagaggcaacttcactttataacaatccattctttcaagaattattccattcctaaaataatcaacccaatctcaaaagacatgaatccatcttaatgacctattttccttttaaaggcagtacctcccaacagtgccacattggggaacatggttcaacatgagttttggtagaaataaaccacattcaaatcacagcattctatccctggctccccctataactcatgtactcacaatgaaaaatgttttcaacccatttcaatagtacccaaatcttaacttattctagcactaaggcaaaagtctaaagtccaaagcttcatctgggactcaaggcaaagtccttccagctataagcctgtaaaataaaaaataaatgtattttctaaatacaatggtggaacaggcataagatgagtattctccttccaaaagggagagagaggcaaaaagaaaaatcagcccaaagtaagcctgaagcccagcagggtagacattaaatcttaaagctcagaatattcttgtacttcatgtaccttttcctgggcacactggggtagaggaggggcttcaagacctcggacaggcccacctccaagactttgctgggtgtagcccgtgtggctactgtcatggattggggttgcatgctggtgcctgcagatttcctaggctggtgtcgcatgttgctgatgacttctgtgggtctggagtccagagggaagtggccctgctcccatggttccactgggcattctagagaagactctctgtgctgactctgccactgtgacagatttctgcctgagctcctaggcagtttgacaaaaactttgaaatctagttggaggctgctgcacctcctccactcttgcattctgcctgcatgcggaattagcaccatatggatgtggatattgccaaggcttacgacttttgccttttgaagctgcggcatgagctgtacctgggatcccttgaaccatggctggaacagccagagcagctgggatgcatggagcagagaatcctgaggagtgtgcttgaggcctatcccccacaacattccacccttggagacctctgggcctaagataggagaaacagcctggaagatctttgaaatgcctttggggtctttttcccactgtcctgataaatggcctctggctttgttctcttcacactaatctatttagtgaagagttgctgtaccgcacccttggcttttcttctgaaaacagttttattctctaccacatggtcaagcaataaattgaccaaatcttttcactctacttcccttctttctagcagttcactagcagttagaagtaaccaggcagcagcctgaacatttgctgcttagatatgtctacaaagccctaggacagggacacaatatgatcaagttctctgctaatgtctaacaaagatggcctttacaccagttcccagtaagatagtcctatttccatctgaggtctcatctgaatggcttttactgttaatatttctgtcagcattctggtcatgacaactgaaccaatctctaagaagttttaaacatttttttagtcttttttgtcttcttttgagccctcattatattatccttaatgctccacatacagaaatactatttataatagaatattattctacttaaatgataggtaagggaggtgatggatatggtaactaacttgtttaaaagagaaagatatgactatgtgctgtctataagagatgagactaactttagattgaaatataaaaataggttataagtaacttgatttaaaaatctgtaccatacaaacataaccataagagagttagagaggctatattaaaatcagacaaaaacatattttaaactaaggtatattactagttataaagagggatcttttaattaaaaaaaggtcaacacggaaggaaaagataacaattataaaggtacttaacactagagctttacaatatatgaagtaaaatctgacaaaattgaaaaaatagaaatggacatttcaacaaatataattgtgatttcaacacccttttcttaattgatagagaaagaacagactaaataagtaaagatacaacaaacatgaaaaatactattgttgtagaaaaaaacgggttcttgtcacacgaccagaaaatattaggcatgcagacactttgaagagtgagggggagtggaatttattggatgaaaataaaaaaaaccctgtcagcaaagcgagaggggttcctgttaacaggtctcaacctcacagatcgaatcccaggtcaccacccaggaacagaagaggccaggctccttcgccctggaaacagggcgaacttcctgagcctctaccctgtctctgcagtgcgcaggtgggcattattcagaaataatcagtcaggaaaagggaaggcttcatctgggacaggcagcctggtttctcagccttcaggctgtttcagccttcagcctcaggcggggttttgccaggggacccttggctgcctcctgtctctatcattccccctcgaaaggagcacatctaactgcccttagaataaggataaggataaacacgaagaccaatcttaactgcttcctgaagacagagggggctgctttggggaaatggcagtcagatctccctcagaggccaatctaagcgttcctggcaaaaggggccattgtccaaggctctgtttgcatgaccatttggagtctgctggcctgaaggagagaagggacaaaccaggttattagaaaacatgtatccaaatgaaacaaggggtgggtgaggacagctcaaaaacccgaggtcttttacgggtgtgtacatggagagggaggctgaaagcccactggaaaaaaaaaaatacttttacctttttgccagcgtgttaggcttctgggtccccttcccctgagcccagtcctaagccaaccagtttaaggtttgtgaaattaactcttcccagtttggaggatgcatatgacgggagcgtcccagagtatggacacacaattacctatcagtgaagagaggacagaggaggaaaaaggaaaaaaaaagtaggcattttttttcaaaggattcctagggatttaggatgcattcaaaaggggtacagactgaagatgaatggctactcatctagaatgaggagagcaagcgtccctgattcctttctctttctagcaaatacatgcggtacgtgagggagggaaaatgaagcattcctctttctttcccccattcttatatctcccagtttcggtgaccacgacagggtgccatccatgggtgttaaagtggctttcaaccatgttcacaaggggacttaggtgataggagtatctgctcttacccacatatgccccatctcccctgctgtcagtaaactttgacaggaacaggaactttcccaggaacaggagaggccaggctcctccgccctgcaaatggtacagacttcctgaggctccaccccaatctcccagtgcgcaggcgggcattattcagaaagaatcagctgggaaaagggcaggcttcatctgggatgggcagcccagtttttcagccttcaggctgttttagtcttgaaggtgggcttttgctgggggacctttggctgcctcctgtctctgtcactatcaaccaactggatctagttgacatctataaaatattttacacaactgtaaaatatacattactttcaggcatacgtgtaacactctcaaagggaccatatgctaagcattaacaaatgtctcaatatacatgaaaggactgaaatcatataaagtatattctctgatcccaatacaattctattaggaatcaacaacaaaatgaatagttggaacatcttcaaaatttgaaaattaatcataaagttataagcccattggtctaagacaaccttttgagagatattaaaaaaatcatatgaataaagatggaaacacaaaattgaaaagctgatggaatgtgggtaagctagtgcttagtgagaactatagcttttagccttaattttaaaaaacataaaaaatttaatgttaagaatgtaagattctctccaaaaaactaaagacacacagatcaaatccaaagtaattagaagtaaataaatagtagatctctgagtgaaaagaatgaaaaagaaagtagaaaaggagaaaaacagtaactaaaatttgtccatttttaaagataaaggaaggaaaacaaaaaaaaatactgatagacttttaattagattgaccaagaaataatgagagaagaaacaaattatcaaattgggaatgtgaaaggattctcactatagaaactgtagaaatttataatgtaggactataaacggaacattatgaactactttattccaataactgtgaaaaacctaggtgaaatggataaatttgtgaaagacacaaattaccaaaacaaactcaacaaaaacagaaaatagtgagatctatatcaaaaaaatgaattattaggagacaaatgtgtaaaactgacaaaatttttgaagtcactttactaaagatcacatatgaacagcatatacaaatggccaacaaaagtgaaaattgcccaacatcactaatgattagggaaatgcaaagcaaaaccacatgcgataccaacttacttctgcaagaatgaccataatttaaaaattaaaaaataatagacattggcatagatcttgtgaatcaggaacgcttttacactgctagtggaaatgtaaactactataaccactacggaaaacagtatagagattctttaaagaactaaaaatagatctaccatttgatccagcaatcccactattgcatatctatcaagaggaaaaaccgtcattaaatgaaaaacacacatgcatgcacatgtttatagcagcacaatttgcaattgcaaaaatgtggaaccaccctaaatgtccttcgaccaacaagtggataaagaaatgtggtatgtgtatataccatggaatactactaagccataaaaagaaacaaaataataacattcacagcaacctggatggaaatgaagaccactattctaagtgaagtaactcgggattggaaaactcaacatcgtgtgttctcacatataagcaggagctaatctatgaggatacaaaggcataagaacgatataatgttttgggttttacatttaagtcttcaattcatcttgagttaatttttgtataaggtgtaaggaaggaatccagtttcaattttctgcatatagctagccagatctcccagccccattgattaaatagggaatctgtgtatatatccaaaggaatataaattattctgttataaagatacgtgcatgcatatgttcattgcagcactactcacaatagcaaagacatgaaatcaactcaaatgcccatcaatgatagactggattaagaaaacgtaatacatatacatcatagaatactatgcacccataaaaaggaatgagatcgcgccctttgcagggacacggatggagctggaagccattattctcagcagactaatgcaggaacaaaaaccaagcacccatgttctcagttataagtgggagctgaacgataagaacacatggacacagggaggggaacaacacacactggggcctgtttaggtgtgaaggggagagcatgaggaagaacacctaatggatgttgggctgaatacctagatgatgagttgatctatgcagcaaaccaccatggcacacgttaacctgtgtaacaaacctgcacatgcacctggcacttaaaagctgaaggaaaaagacaaaaagaatgatataatggactgaggactggagaagtgtgggaggaaggtgagggataaaagactacacattgggtgcagtttacactgctcaagtgatgtgtgcaccaaaatctcctaaatcaccactaaacaacttatccatgtaaccaaaaccacctgttccctaaaatctatttaaataataataattaaaatcacataattcttatagtaatttaaacatcattttaatagttctatatcacttgtattgatattttgatataaaattagactaatttgtctttcattttttaatgttttcacttcttttttagttacattttttaatttgtaaaacttttctgtggttaaaatatcaagagccgtagtatgaaaaataaatatacatagaaaagacttactttaggggctgggcgcagtagctcatgcctgtaatcccagcactttgggaggccgaggtggtgggtggattatgagatcaggggttcgagaccagcctggccagcatggtgaaaccctgtctctactaaaaatataaaacattagccgggcatggtggcgcatgcctgtagtctcagctacttgggaggctgagacaggagaattgcttgaaccgggcaggcggaggttgcagtgagccgagattgctccactgcacttcagtctgggcaacagagtgagactccgtctcaaaaaaaaaggagagaaaaaaaagaaaacactcactttaattctgtccattgttgaatgatggctgctcaaaattgtagaacaactggtttattgggaaaaaaaattgtctgtatttgcatcttggtcaaggactatattaccttgataaagtcttagtaaagtattgaaagggggagggaaaattggggtatttatgaagctttggaatatgatttaaagaagttcttttatgagagagtttcattacggagaagcaaggattttaatgatttacatttggttgaggtggcaaggtgaacattttgagaagccttagaaagacttggggagtaagctgtcattttatgccttctattgaagagctgaacaatttgctctttattgaaataagattttcagaaagttcctggaatgaaaagttatttgcaactattatcttcttgggcaagtttcctgcgattataaagtcatgttgacacacatgtagtggaatggttaaatcatgaaaatgtggacagtatgctgtgtgggggtggatggttttggttctcatgttccaccatgattctctctgttccttaacagtgtaatttttgctagtttattcattttccatctggtgtttactttttaagaaagcaattgcaggtatagccattgcttttcagacatttattaatgcttaccacacatttacaggaacaactactgtgaaccatgcatggtgctaggttttaaagattaaaatgatttaaggggaaatgagattttcctccaaaataaaaaaacttactctaacttccagatttaattgctaagcacacataattgcagctaaaacaggttgatgagggattgatgagggagagtatagagaagcgcctgtgtggcaactctgttcacatttaattaactgtctatagatggctgctaccagcattgatcaaatgactacctatacatattttactcttacacaggaaaaaattaaattggatcatgatataatatttatataactttttaccacccatgttttaagatataaattctagattaatggagaatacatcaattttaggcaattttactaagaagagcagatattgaagaacaaaaagaaacactctgtaaatacaggtgtctactcgaaggttcatcgaaatttaaatttgttgtgaattcttcacaatgagacttttcattttcattagaattcttgcagcattattattccaggattggaatacagttgcatatgataatctttgtttcctttataataactatgagtgactcagttaggaattcaccttggcacaggactaagttatttctgatctactcaatggagtgtatgtatttaggattattcatccttgtttacttaatgtggttttcttcacacattgttttttagatgtcatttgagagaaacaaaacctttaactcttactgagagggaagatgaattttctaaccctgggatttggctgctcactgagtgtacacataatagatgggtgcttccattgtattattaggggcattcagtagagggcctctcatctaccagggcacaattgagtactcctgattattgatttgtttatttgtgtttatatatttgtaattcccctttaaatactaatattatcaagtgttctaccacatgtgatttccctgttctgagctgtctaacattaagtataatggccaaaccccattttctgtgggatttgggattcttgacctaaggaccacccagcaccatgcccctgagacctcccatcctgaacacagctaatcggactggagaagtccatctgaggaagaggaagcagttgtcttctgtagtctgaccaggagattagcaagaagtctggcccaaaaactctgccccacaggtttctctaccaaatggtgaaggccaggtgttcagttactttttcctaaggtgttgaaacgtaaagcatgtggaaaacatgcaaatagaaacagcaaaatggaagcaaacagagaccatgaatcagtaaaatccatgaaattaagggaagtgaaaatcaaagtcggaaaatagtggcagccgctccacagtagtggagcatgagggtaggttatcttcaagtagtgaggtttgtgtaaattagatttctttatattttctctactttttaatgctctgcaatttaaaaaaatgttacttttgtcatcaggataatatgttcaaatttttaaaaagtacctaaaattttaaaaaatcactagcttgatttaactagattttcctttgtttatcatcatgactctgcaaaagctgcagcatctgctgctttatgaatgaagtgctgattaggcaagcaaaaatacagttttccagacctcacatttaggcaactgttaaaagcctagtttccgagtcaaagccagatataaatttctaccctgtgtctcaactcagggccagttatggatggtggagagtttgagatactagtggttaagtttaatttcagctgcctgtgtttgtaaccatttgactttatctaaggaaggcaattctacaccttctctcaataattttttttttccacttggttttctctgacataactgagatcattgacattctgactagagcctaagaaatttcatgtatgtgtctgattcagtggttcaaggccttaaagataagcctttaattctgaggaagagcctttagcttctcccgtctcttaatacaaacctgattcatgccaggtttgtctaggggctacgtggatggttaataaaaacatgtaatttctatcccccaaattgtacctatttaggattagatttcagaatcttatttgaaacttaaacaggctttagaaataattttgtcccactctattattatagagatgaataaatgtactttcaaggcaagtagagcgacttgccaagattacaaaaaaatgtctgcgacagagccgagtctagatgtttatcttctagtttccagccagatactagttttatggctagtttccgccatgctctgagggaggcacattttccatcatcttttatctcaacactgaatactgtttttgacacatagtaggaaatcaattaatactatttaaatgaatacaaatacatgatgtaaaatatatcagagaagtctattatgtgttttcagacaagcttttatttctacagtgtatatttttatgaaactgatatgtatttttttagactaatgtgcaccatcaaatagcactcatttttgaaacattttgagcgtgatatgtatgtaccatcaaacggaattgagtaatatctgaagttgtactgggcactctgccaagatttgtccaaagaaagtaatgtgaaattagctttgcctttctgaatatttacaaaatccaagcaaaaaaagaaaaatccaaagggaaaatgctgatctctggaatactttggacaattcatgcatcaaaagccaactgcagagccactatttgcaagtcaagtctcaagatggtatactatctccaggaaaaggcttggaaggtaagtaagcactactgttgaccccaatatctcaatttccacggagaaaccatatttgttaagatgcagagagatctctctaaagtgctattgccgagattaaatttgagccatctgaaggcttcgtcattatcttagatcttagccttacttgtgccttattctgttctttaactatcacttatgctgcaaactgtgatcctattgtgattttacccttactaggtggttttcctggtaagataagtatttgattctgctcaaatttctcctcttgccttcctaactggtctcaatctttctttctgcttagtatcattctgtctcagcacccgtttatctggctgcgctttggccagtttcattgtttatgattatttggttttggtgcctgcctatatgatcagttcaagtcctagccgtgctggaaaatttctggccccattacagaccagacatttccactcacagctgcttctgtatctatcacaagtatgcattcatgcccatgtgcatcaatcctatatcaatagttgtttctacagagatagcctctgaagtccatccttttgtatatggtcataggtaaactgaaaatgggaagtaacaaggtctctgttaattaaaaggtccattaagggctcaatgccaaaagttggatacgggaaagcttgccaagtgcacaaggttagaaacttaattgcacttctctttaccaagatttctatcaactgcagttctcaaatatatgaccttcctttaattttgtactgatgtataaaatgaggattttgcctgtttttgtacttgccatttggaggacatatatgcatgcctgccataagtggaatttacatatgtatatgtaaaactacgattcttggctttatatcagtggaaaaacaaatcagattatgtagatagatctgtctttatacctgatttgctttatatatatatatatatatatatatatatatatatatatatgcacacacacacatacattcatatttattttaatgggcaaaatatttgagaatatttacatgaaattttttatgtagtaatctaattttggaattgcactatttcttttgtagaactccaaaaataatcagtacacaaatttgaaagcaaaacagtaaacttgaagtcatttttggttactctatcttctcagaatactgaggtaattagactacagggtgtccttcaatacttgaaattatattttgctgtttgcaattaagatgcactgcagaatatgttgtcatggaatggccaccccaatggctgtcaagcagacatttttcttagccaagtcacacaggtaagtaacaaggtagattcaaggttgataaaaagcaaaagcaaatccacacttattggtttcctggtgtgacattgagtatactttgggatttcacagaagggttagtcagagtattccttcctatattttgatcagttgctaatacaggtttgattcctctttcaagtagaaatgactcagctataaatttatagctgcctctgtaggtagttaatgcaggtggataagcaatattgacagcatgactaagtctagccaaagcaggtgcatgaaaaattattagtccattctgcaaaaccctaggccatctattctgtaggatttatctgtcttttccattcccggtatcaagttcttaactactaaattaagcttatactgaagaggaggagctaggaaaatcttccttagatattcagatactcaatattccattaatcgattaattaaacaagaaatcaattaaatcacaatttatttgtgcacttttcatgtgacaagcatttcgctggttctgatctcacaagagataaacataagaaaccatttctgcacactgagaactcaaaggtttttgtgggagtcagaccagttatgaggctgcgttccagtttcaaaaatagcagtttatataaagagattgaaatttctgagaagattaatagaattcagacctgagaagaccgctcaagtcaagggacagtgccagaagcgagcatacccctagctgtgttatcgctgcctggtgatatcctgtgggtctttttattttataatatttcagagatgtgttctgtaactcatatatagggagtcaaattctgttatttctattcatgcctggcatataagactgatatgatcttactgttagacttttcatgaagaatggatgttagattcaggtatatatttttgaagttaaatggcccttgttacagatgtaccagagctccccaatatagaagcagttcttccaatattaattactatgtgttgtatattacaagttgccaaggtaccaatagaaaacacacaaagtcactgaatggaaaccccccaaataatgtaaaaaatatcacctcttttagctcttagaaaatgatgtcgacttctttctaaaggatattgttactggagggatgaggaaaaaactcaatttggaggaaattagaaaataatttgcagtttagaagggggttatcttatatacatgttggtaataattcaacattaacaataaatgttataataacaacatagttatcatagtaaactattttataccaaagcagtagtcccagaacttaacacatattaacttttgattcttattacagtgctatgatgtaggtatgtatgtcaccccgctttagatataagaaaaaaagaggcaaaaggagaccaagtttttccaaaatcacagctggtaagtgtcaaagcctagatcaatctagatagcctggttccaggtgccttagtcttagtcttttcaactgtatgctgcctatgaatttatgatacctcacttcttctcctatgctgtgctcatggtagtttatgttaatttttcagttaaaacatttgtcttttccaagtgtgcggtcatgccattggtctatttttataccactacctttgaacttttctccgtctgatgtatttctcttatctacatgtgtagatcattacctccagaataatagttgtagcaatgggcattgttgccctaatgggaattcttcaattgtcttccccaatatgtgtgagttggctttgaggttaagctaaatatatcttacagagctaaggtttatgtaagaaatcaacttcagaaatccagctgaaagtcagtagtgtgaagagaggtagtcagaatgtaaatcatttcaaaggtagagttgagagcatttcttgatagattggatgtgatgtgtgcaagagaaacagaggattcaaggatgactcattttttgattgtcattgtttttggtctggccagctaaaaaggagaatgtattacctactaagatgtggaaggcctgggaggagcaagttttgaagaaaggtcgagaatttatttattgctgtatgtattaatcagggttcttcagataagtagaaccaatagggtagatacgcagtgagagaagtagtgaaaggtggagaaagagagtgaagagtgagagactgagagagagagagactgttttaaaaaatggcttaagggtttgttaggatgaacaaatctaaaatttgcagagcaagccaggtacattggctcacatctgtaattctagcactttgggaagctgaggcaggaggattgcttgagcccaggagctcagggccagtctaggcaacacagcaagacctcatctcatatttatttttttttaattagctgggcatggtggtgtgtgtctgtggtcccagctacttgggagtctgaggaaggaggatcacttgagcccaggaggttgaggctgcagtgagctctgatcacaaacactgcattccagcctgggtgacagagtgagatcctgtctcacacacacagaaaaaataattaattaattaatttaaaaaactaaaaagcataaacaattaaaaaataaagaataaaataaaatttacaaagcaggccaacaggttggaaattctgacaagagttcattttgtagtctgaaggcagtctgggggcaatattcactcctcttcagtgaacctcagtcttttgtattaaggccttctaatgattgtatgaagtctacaaacaatatgaagggtaatttgtttttaccaaagtctactgattgaaatgttaatgacatctaaaaagtacctttacagcaacatctagtgtttgaccaaacaactggatgccataacctagctaagtggacatgtaaattgaccatcacagcatagtaagttttggatgcctactagacatctaagataaaatttcaaatagcctgttaaatacacacatctaaatatcaagagaggaatccaggcaagagacatacattcttggattcatcagaacacagatgtcagtgaagccttggctcctggttccgcagactgtacaagaagcatggtgtcagtatctgcatctggtgaagtctcagaaagttttcagtcatggcagaaggaaaaggggagcaggcatgtcatacagcaagagagacagcaagagagagaggggagggaggtccaagattattttataacctgatttctaatgagctagtagaggggaggactcactctttactctttactgcagggaaggcaccaagccattcatgacccaaacacctcccacaaagccccacctccaacactggggatcacatttcaacatgagacttggaggggacaaaatatccaaccagtatcaaatgctttacccaatttagcacagtgcccaatttattaaagtaagttttcaaacacttctttaaaaataggtgatatctctctattcctgatgacttaaataagatgaatcaattttaccccaaaactgtgtatgctgcttgaatgctacagaaaagaaagaactaaaatatattttaaaaatatctaaaaccattaaaatgtctcctggtgatatttaaaattagaaatagggcactacttatttaagtagtatattaataatgtgggaattggttgaatctttacctcttgtggttctggaactttccccttgcaattgtatatatctgtagatgacttacgttatccttaactgagggaaaaaatgtgttatggaagtatttttgattctggttaatgcactttatataaaatgccaaaagtaaattattagaggtaaagatgaggctttgaaatttttatgaaatatttcggtccagaacttggttaacccaaatcctgtcctgctgatcatgcattctccatctggagttcctgagaggctctacatctgagtatcagagtatcactttgataatcactatttaatgtcttacagtatagtacagacctttggacaaaggatgaggtggtacaaatggagtagacacaaggcctgatgagaactttttaatttattttccccttaatgtgtgtcttactactggtataaacaagcatgcttgcaggaaggagaaagagatggctaaaacaaaatcaatttatccattatggattagagtccatgtataacagagagaaagagctattttcactatagatagcttcagatttatggctcaaaaactatgctgctggattgtgtcaaacagtttagtaaaaatgaaatattattctctcatttggcataagacatcatgttgctcgggcacaatgagtgatcctaaaaatataatatggttatagcttctgttaatcaagaatgaggtaaccagcagcttctgaaaacaaagactggtaatgatggagatctcccttgagacataaatctcatctgtgatcaaaagaagagtagccttggctcctttctggggatccctggcagccatgatttttaagacacattaacaaacaactctgtggcagcaggaacttcctgggaagacaacagtagaaggaccagagtagaagatgggggaaaatatcgaatacctaagaacacagaggaaaatatcagatactcagaaaaatatccaatgactaagaaataactcagaagacagcaggatttcactagagtagatggggatagaatctagaaatacgtaattttattgttataagatatatttcgtaatctttctccctgaaattggaagcaatgcaaacacagggctgctgcagcctctattccagaaggcaacctttctaccctgtagtgtagtggccctatttttttttttttacttctctttttccccacctttctcaattgcttttaattcaccaattatatattaaatctctaccatatgttcagtgtcaaactatatgccagtgtaaataattggtattacccttcacacatggtatgtctaggtccagaaatatacaaatatatgagtaatatgaattgtttaatattataaaatcttcctcagctgccatgttcagtggttgtaaatatactgtggaactatgaatggaaaataggtggaaacaaataaatgtatgctcagcaaattaaaaaattctaaccatgttcttactgctaagaactttctacctgcatatattcctggagtgtcaaacctgaaaatgatcttctgcaacatcagtttatttatattaatttgtatctattagacttaggaaaatagtataaaaacaggaaggaattccatgagggactaaatgaaatataaattcgtaatattttttatacctataaaaatgaggccaggtgcagtggctcatgcctgtaactccagcactttgagaagccgaggcaggcggatcacgaagtcaagagattgagaccatcctggctaacatggtgaaaccctgtctctactaaatgtacaaaaattaactggcagtggtggcatgagcctttagtctcagctactcaggaggctgaggcaggagaatcgcttgaacccgggaagcagaggttgcagtgagccgagattgctccactgcactccagcctggcgacagagcaagactccatctcaaaaaaaaaaaaaaaaaaaaaaaaaaagcaaggatgtcaaatttgggaactattttctatttgaaactttccttctgtctctaaacaagtttaaaagcagcacccccacctctcaaatgcccttaatagacaatgtaatataaataggtactacaactcactaggtttgattcctgtagaagatgaaaagtgactgctccacggcaagccactatgggagattctttaacaaactcaaatggattcgagagggaaaattgttgatgcaaagctgtttaatgagttctgttactgtgaagtgaaatcagtcctcccaaggatcattcactgtgagaggcagaatggaaacttcctaatgtcataaattgttataccgatatttatagcaaaggcaacatagaactctggagtttgaattagtttttttctctccaagaatacatttttagtattagctgtttgtttcaacctgggaagttttagaagttatttctatctgggcattttcttagcttgacagtttaggtaagaagtctgtgtggctatgccagtagcatatctctttgtgacaagaacatgcatcattctttggctgagcaaaagacaaaattatttactcaagataagcaaagattattggaaggctgaaattgcaaatgatgaaagttctacccatagattttgtttgcccatgactttcattctgtccttgcaaataaaagaataacttgatatatttcattgaataatcacattttatatttccaatttactttattaaaatatgattttagtcctttaaataaagttgaattgagaacaaagagaaaaaaataatatccaataatgtcagttcagatattgtgggttaatttaaggatgaaataaaactatataaatttgtccatgtccccatgagtttctcagtgttttgaggttttgctcagattcatttacacatatggaaaactttttaatatctacataagggattcacattcgaagggatttcattttatccctcagtgaaatgaaatcccttcaaatgtgacttccttacaaagtctggccatagtcttgaattatcttagctgcattttctctaaagcgtcactgtccaactgaaatatactgtgaaccacaaatgtgaatatgacatttaaatagtctagtggcaacattgaaaaaataaaacaggaaaataattttaatgtgatataaacatttaatataacatatttaatatatttaatgtaaaagaagtatacttaattttaataaaataatctagttaaccaaatataaatgttaacttttcatcatgtaacgaatatataagaatgactcatgatttattttgtcttctttaaaagaggtttataatctttgcttacagatatttcagtttacactagccacatctgaagtactcaaagccaaatgtggctagaaagactattgaacagagacgctgtatggtacatattcttattagataactattatttaaggaagtagcataagaagatattttaaatgctaatttaaaattctaatgacaaagccatgttttatatgatatgtgtgaataaaacatagtcagatcttttaagtgaatgttttctttgtatatagagagagctgtttctgtctgtggaaaatttctgctgaggaaagaactaacaaatgacaaaaagaacggctttgcctgggacagtagcagaggaaactaagaaaaaggatgtcctaaaatgagttaagaaaatttttacttagaccctggacatcatagattataaaaggagcatttaatgacaaaaatatcataatgtctcaatgtacagtgaatcaatagtaccttgtgggactgttgtctgatactaattgaaacacagtatttgaaagctacagttgtttggtttgagtatgactgtcttcatcagcaagaataccttacatagtgtctgttctatttgctattttttttctattcttaacttttatgggtttatctttggcaaaagctgattttataaggagaaaatctataaattgcattcatggttatgccaaactcctcaggtacaactatcaaataccagcactttccagggaagattgtcttcaggatctgatcattcagcattttaccagaattgttgttggaatctatggagccacagtctctgttggactctatataactttcctccaacctggtcagaaccatagctaatcaagtaataagacattatgacaagaaataccccttacaaagacaaccaaaagagtcagcatccagtattgttaaaaacagttccaagtgtaaccaaatgtttttacttctcaatatttttttaaagtagcattattatatgtaaaatataagctttgtatggcagtagtttttgcattaagccagaacttactatttttcctgaaaatacttactaatgtacagaacttttttattataaaataatgattggattagaatgtatcctaatgactttcaaacatttaattttattattttctaaaatgttattaattttgccacagattattctgccttagtgtactgtcaagataaattatcagcagataggaaaacaaaaaaaaagaagtcaaattttttaaaaaaataaagagaaactattgacatggctcctagaagtctgttgaatccaattattgctttgtagtcactttgttacttcttgtttgcctcagttttatatttcttttgtctaggagggtgtatttttaaaatatatatagataaggataaatataaattaaaattgagaaccttaaaatgcatatgcacactcacttgtacaatgggatgattaaaaatgtgtttaaatgatggaacataggtagctgatacatctaatatttaagacctcacctttacttcattggtaccagtcactaagataaaaggcatattatttattcctaagatcaatttaagtgatttgagattctgactaatagattatgattaatcgtctgtagaaagggattgtgttgagtctgcactaatgggtactctaccttgtctaacatccctgaaaggtaaaacatgagcatcttcatctgaatggaagagagaagtagaatcgttggggaatgagtggagaatgaagatagtgcctctgaaatgcagatagctttctgtggaattaatcagtgaacaagttcataaaaaggaaaaaggcagagatgaatgaggggctctagcagaaactgcaattgggtagaggtgctggcccctaaaagggtttatttaataatctaattgactgttttccagagaggagttatgggtttgccaacttgcatgaggtggcaaggggtagttggatagatggatgctagacaattctagaaacgtatctaggcattaaaaatgattttgaatttgcttacaaatgcttactttcaactaagtactattgtgtactctgctaaagtataatttttacgttgtttttgttgctgctgttttgtgaggggagggaaggatctaatattatagtttctaatgtaattctaaggtacttaccttttcactagcaatgacatttctagtaacctagccttcaaaattgctcattctcagaggtatattcataacagtatttattatagaattatttacaatgagcataaattgaaactaaaaaattaggtaactctttataatagaacactattccacctaaatgaagcacatgtagtatatgttgaaaattaactcaaccatttttcatttcccttttaaaaagatagataagtggttgattcagtaattgatagtgtatttggccatttttgcattgctataaagaaatacctgagactgggaaatttataaataaaatggtttaattggcttatggatctgcagagtgtacaagcatagcacgggcatctgctcagcttctgaggaggcctcagggagcttttactcatggcaggaggtgaaaggggaggagccatgtcacatgggaaaagcaagagcaaggaagaaaggggaaggcgccacatataccaaacaactaaatctcgtgagaactgacttaataccatgagggcagcactgaactaatgagggatctgcctccatgacccaaacacctctcaccaggtgccacctccaacactggagatgacatttcaacatgagattctcaccaggtgccacctccgacgctggagatgacatttcaacatgagattctcaccaggtgccacctccgacgctggagatgacatttcaacatgagattctcaccaggtgccacctccgacgctggagatgacatttcaacatgagattctcaccaggtgccacctccgacgctggagatgacatttcaacatgagattctcaccaggtgccacctccgacgctggagatgacatttcaacatgagattctcaccaggtgccacctccgacgctggagatgacatttcaacatgagactctcaccaggtgccactccgacgctggagatgacatttcaacatgagattctcaccaggtgccacctccgacgctggagatgacatttcaacatgagattctcaccaggtgccacctccgacgctggagatgacatttcaacatgagattctcaccaggtgccacctctgacgctggagatgacatttcaacatgagattctcaccaggtgccacctccgacgctggagatgacatttcaacatgagattttcaccaggtgccacttccaacacgagatgacatttcaacatgagatttgagtggggtcaaacatccaaactacatcattctgcccctggcccccacaaaattcttatgcttctcacattgttaaatacaatcatgccttcccaatagtcccccaaagtcttaactcactcaagagttaattcaaaagtccaaagtttaaaatctcatctgagacaaggcaagtcttttccacctataaacttgtagaataaaaattaacttatttacttacaagatacaatgaggttataggaatttggtaaacattcccattcccaaatggagaaatcagccaaaagaaaggggctgcaggccccatgcaagttcaaaacacagcagggtagtcattaagtcttaaagctccaaaatacactcctttgatgaaatgtcccacatacagggcacacagctgcaaggggtgggctcccagggctttgggcagctctgctcctgtgtcttttccgcactgaagtttcaagctgctgttggcaccacccgtctggagtgtggaagatggtggctcccttcccacagctccactaggcaatgtcccagctgggactctgtgtgggagttccaaccccgcatttccccatagcactaccctggtagagtttctctgtgagggctctgcccctaaagcaggcttttgcctggtaacccagcctctctcatactttctttgaaatctagggtgaggttgccaaaccttcactctcgcagggtgcatgcctacaggcttaacactacgtggaaaccaccaaggcttatggtggcttatgctctctggagtggcccaagctgtactgtgaggcctctgagcagtgactggaaccacagcagccattatgataggaggagcctcctgaggtaacactgggcagtagcactctgggcctattcccataccaccaaaaccattcagtccccctgggcctctgatgggaggggctgcctagaagatctctgaatgccttggaggcctttttctcattgtcttggctattagcacttgactcccttttagttatgcaaatttctttagtaagtgattgctgcacaacctacttgaattcttctcctaaaaatgggctttttgtttctaccccacagccaggctgcacattttccaaatttttatgctctgcttctcttttaaatataacttccaaatttaagtcatttctttgttcctgcatttgaagctggctgttagaagcagccagacaacttcttgaatgctatgctgcttagaaatttcttctgccagataccctaaatcatctctctgaagttcaaacttccacagatccttagggcatgaacagaatccagccaagatgtttgctgagggataacacacatgacatttgctccagtttccaacaagttcctcatttccatctgaaacctcagcagcctggacttcactgtccatatcactatcagaattttggtcacaactatttaaccagtctttaagaagttctaaactttccctcatcttcctgtcttcttctgaaccctccacactgttccagcctcagcccattaaccaattccaaagctgtttccacattttcagctatttttataacaatgccctatgccttggtaccaattttctgtattgggctgttcttgctttgctattagaaataccttagaccgagtaatttataaagaaaataggtttacttggctcttggttctacaggttgtacaagcatagtgcttgcatttgcttggcttctggggaggcctcaggcagcttttactcatggcagaaggtgaagcaggagcttgcacacacatggtgagatgaggggttcaggggtaagagaggtaggggaggtgccacacacttttaaacaaccagatcttgcaacgacagcaccaagccatgaggaaaccattcagatgaccaaagcccctcctaccaggccccgcctccaacgttggtgatgttagaaatgctcgtttcccagtgccgtaaagaaatagcacttgaacataaatttaacttcctcagcaaggccatttttagactttctgcagaaaggatacactcgccagcagttttgccatgagagtatattgaacaaaggagactgggttatttataacctgatccatccactctacttctgtgtccagtttttattggctgaatcggaccttatatttagatggagaggaaagtctctttgaagaggaacctctactttactttttacagtgattacatttctagatgagatttgggcagcaacaaatattcagattatatcaggtagcgacataagaaaagtaaagggaaaagcaaaaaggagtgaagaaatgtacagaagggagaaaaaaagaaacaccgaaaaaagaaatagaaatgataaactttaaccgtaattattttagtgaataaaattttaataaataaaggagggcattttgtagttttttgctttatacatttaaggaatttttttttcctaagcttttcttactagttttaaaatatattaaaaaaaaattaaaaattgtatacatgcatctgcttttcttatttggaggctactgtaatgtttaaactgcattttatttattaatatactccttgtgtgagaaaggaggctcacaaggctatgtaaaattcaacaagctagcataaataaaatgtttggaaaaaataaatgacaaggcaatatgtgatcttaaaacagagtggtaatgaggtttaaaaatatataacattatgtccaaaaatgagattccattatgtctggcatgtaagaagagctcaaaagaagacagatttattttatgtgcttaataataaaagctaattgatgtattctagacacaatacccacagtgtcctcaggactttaaaaatctcatgcatattttacaattaaaataaacattaactaagtgaatggcttatatgtcccttccccagcatgtaatcttgtctagaaccttcgtttggttcactttgtcagtaaaacacagggaaacataaacttctcctcagaagaggcaacaattaagttggaaatgttgacaaggtaaggtagatatgggacaaatacttattagcagtcatacagaatcttgaatgacacttggggttttcacactctgttgaaaaagtaacgcctatagtagaatgttcacttcttgttttcatcatctaaaaatgtatatgagcaacctggagcgtgtttagaggagtgtgactggaagtggaaagacactttttatgacaagcgctaaaagaaagcagttcgttttggaggccttggaaaaagagcagggacacaggttctgcgtggtattcttttgcaaatacctgaaaccactagttgggaaataaattaaatgaattaataaactaggaactgtagtttgaagttagatggagtggatttggaaccgatttaagattttttaatgagcagatgattgatgaaattaattgtcacacaaattgatgtttgctattaatatttagctttaactgaatgaatacaaggtcagtgctcaaatattggaaatgttcctggactagacaattctaagattgctacaatgctgccagatccaccgttggactttccttaattcttattcaataattaatgaatatgaaattaatcttcataatgtaacattatgaagcacagaaacataaaaacaagtttatctgtgaatgtatcatagagaaaaatgagatttaacatttaaaacagtggataatagtaacattgaggctcctttacatctcgatagatttttaatgtctttgtccgtcaaagtattcaagtatttgtggaattcagctatgtaccagaaataaagtagatcaggtaatacaaacaaacaatttaatatatttcaggagaaaaattagaaaatattcctccttttacaacacgtataaagaaacagctaaattgataatctcaggtttttgctttgtattgaattttctacccgaaaagccttgggcagtactttttcaagaatgatgttcttttcatatttgactttaataaagacagcacattgcccgcgtccataaaatggtagatgagcaaattgctctgtgttttactgctcactcgactcctacattcatagtatttgacaagtaggacttaaatgggaacacttctttttttcttggagagggcagttactctgaaatcttaaatgaatcatattggagtaaggtgacataaatttccctcctcatttattaagatccaatctgcatgcagtactctgccagacacattatattaggttggttaaacagatatgatactagcttcttaagagaataaaaatcagatgatatcaacatagagacccagggttattattcatgacagtgccctgtgattcttcatgaactaatatagctcgcgaaagcgaagggatccaggaattctgtgataaatatgaggcagtttgtcctgaccagagatctaaagattgaaaacagtcatgagaggctttttgagagtctggaggacaagtccatgactgtaaggaggtcatggagaaacaagcaagtactgttacctgagcatcggtttgagtaacaaggagtagacgacgaagtgaaaggaccgagggataaaatgttggtgcccatggggtaagataaccatatcatgcaatcaggaatcccaacagaaactcttgcatattactaggtcaggatgcagatgagggaaaaaataaacatggactgcaagcatgaattctgatactgcagtggtgtagagatagcactacctacagcattctgcctaaagccaatgatctctgagtgggaattgacaaaaaagcaccactctttagagctttaggaatgagaatctaaaagaatttctcacatctccgctagccctcttggactctccattgtgctaatcatattcagtgctggtctctaacacttcaggggtctaaccgaatcacttttcttgtgtttgtgacccagcttgccccgaatgcacaccctttggatatcatccctccattcttggcccaatattgtcccttcactccttgtagatctgaatttaaaagtagaacaagcaggcacttgcatctgcctaaatagtcatgtgaactacattttgaacactagtgttctgaatcttcatttctgcaagatatctttaaagtgggatttggaattttattagaattacatcagaattattgataataaggcaaataagctgctttccaagggaaacgggaaatctgtatactgtatagtgataaaaatgatgccattaaacatcgtaagttaagctctataaattacccatactccagatagaaaagcaaaccaaacagaattaacccagaaaagggatttcaaattatatagttaacatttgttttccttttttctaccctgggacttattgttatctattagtcaccttccttagaaaacatcaagtctgtggataaatacacttaatagtgttagcaggaatgctattcatgacagacctcaacatgttgactcgtactttatttaagctattatgagcttggcgaaaatctgaaagaaagacgatgcaatttattttaggaaatacttcttaaaagtaaagatttcaaatgtgggagatattcatgaatagaaagagttggttttgctctcattggttctgcttgttttgctactgtctagctatatgagggactttaggaaagccattcctaataaggtgggttttagttttctcatctgtgacattaaggaattagaaatgatcatgtaaagggaccatttccttctgttatactatagattgttattgatacacaaaatgattggttaattcaagttcaattttgttaacctgaaatattttgaattacttttgagagatccttgtttaaaagccataggcaattttgtgtgtgtgtgtgtgtgtgtgtgtgtgtgtgtgtgtgtgtcttttagctcagtggttatcaatggggcaatgttccctttcagcaggcatgaaacaatgagatattattgattgtcacagatatgggagagctactgcattgagtgggtagagactacaaatgctgctgaacgtcttctatgcacaggaaagccgtcccttaacaaataattatttggtccaaaatgtcagtagtgccaagattgagaaatcgtgcaactagttatggtccagattgatggcatacctcatccttcatgatatagtgatccaagtgccttgtcatctaaaccaaacagagcagaatctccaactctccctgccctgagaaaagggactctattttctgtcagacagtaaggattggagaccgtatttgctctcgtgcttgagagcccacatcattattgggttaacagtcatagctagagaattcagtctgtgtattttttttattagtgttattttccctttctcgtaatgtaacaatttttataaatgtttcatgggctatgaaagaagggcatttttcattttcatgccactgctttagcaatgtatagatacaatcaatattatggattgtgatttaggtgggtgttctatatatttacagtcaattaaaaaccattgaagagcttttcattgatttcattaatttctattatcttaataattctatattcaggcagggctactttagctatttgtgtgtatgtgtgtttccgtgtgtgtaaatgtataaatacatatacatgtgtgtgtgtgcatatacatataaaatcaaaggcatacctagacctaaacaaaatattctgttctcatgatgtaattaatctcataagcaagataccattctctgtgtgacacagtttttttttctagttagaattcacattcactaaatgtttaacactctcttgatttcactttaaaaatagaacatcaggctcacatatggctgctctctacactagaactaccctcaggggtgcacaaattgaatacactcagtatttttctcctggagttttttaaaaactccatttatttccttaaacttttgagacaacagggctgatgttttctgtaatgaagttagctaaatgagctttttattgaaatttattcaataagattcattcttcatgtgtcaatcagatatcacgattaccatgctcaaatccaaattcaaatttttgttttatgagatttcctacacttctggagacttgaattctggtcttctctaacagtcattatctatttatctttaaataaataacttctgtacactgtggattgctttatttatactttggtaatagttttctgctcaatttgacccagagataggctcaggtagtaatattaagggcttctgaaaaatatcaattactatacatatatgagtaatggtggtagtataatttacacattagacagcaaagcaaatcaacaaaaactaaattaaatagggcaaaaagatgctgtggtacgaaattttctggataattttagttttagatcatgttgttaatttataattgagaatttgataaattagttcaatcttcattaccaaccatttgaaacactggctgatatcatggccaggtaaattgtgtcctttttttattaaacgtagttgactgaacacttgcttttcacacattgaattgggtcctggcaatacttggatgaatcaaattgtttccatatccttgagaaactgccagtgcaggcaaaatagggtaacagatgtaataataaatgcatgcacagcatagattggagcaaatggaagcactgacaaactcttcttttttaaaaaaaataattttcatttttttgctgatccataatgtggtacatattttggaggtacgtgtgatagtttgatgcatgtatataagatttaatgctccaattagagtaattgggatatttatcacctcaagcttgtatcttttcttggtgttgggaacgtttcagttcttctcttcttgcttctttgaaatatatttttaaaatgttaattatcatccacctactatactgtcaatcactagaacttattccttctgtccgcatttttgtaaccattaaccaacttctcttcatccctccctccccaatacccttcccagcctctgataaccaccattctaccctctatctccatgaaatccacttttttagcttccacatgagtgataaaatgcaatatttgtccttatgagattagttaatttcacttaacataatggcttctagttccatccatgtttctgcaaatgacaagattttattctttttatggctgactaatatttctatacacatgcacacatatatatatatatatatatatgtatcacatttctgtattcattcatctgttattccatatattggctattgtgtatagtgctgtaataaacctaagagtgcagatatctcttcaacatgctgatttcctttcttaggctgtgtacccagcagcgagattgaataatatggtagttttatttttagttttctggggaaggaacactatattgcttgtttttcatagtggctatactaatttacattcccaccaacagtgtgcaacagtgtgcgagagttaccctttctccacatcctcgttaccattcataatttttgtctatttgataacagctcttttaactgtgatgagatggtgtctcattgtggtttgattctaatttccctgatgattagtgatgttcaacattttttcatatgcctgttgaccatctttatgtcttcttttgagaaatgtctgttcgggtcctttgccaatttttaattggattattattgattttttttgctattgagttgtttgagttccttatatattctgattattaatgccttattgtttggataatttgcaaatattatcaaattctgttggctggctctttactttgttgatttgtttcctttgctctgcagaagctttttggcttgatttaatcccatttgtctatgttgctttgcttttgttgcctatcttacacaaaaaatctttgcccagattaatgtcctgaagaatttccccagtgttttcttctagtagtttcatatgttcatgtcttacatttaagtctacaatccacgttaagttgattttgtatatggtgagagataggggtcaagtttcattcttctgcatatgtatatctcattttcccagcaccatttattaaggagcctgtcctttttccaatgcatgttcttggcacctgtctagtggacaaacttttaatttttctgtgagtaaaagcatttggacagatgttattgggagtggtaatatcattctttgttttacaaaacaactctgttaatagtggaaatgttaggtcaaaagggtgaaaaatgtttttcagagatatcaataaaagtctattgcaatgcaaaataatgtattgggtatggaatagttacaaaaatctttgtgatcttgattaagaagtgatcattctacaaatagtgacatgttgaacatataccatgttcttacctctgtgtttgtcatctcatataaactaagtgcaatagataaaatttggtttaatttgtctctacaaatttaattgtaagagtttaggatttgggatatcattaactcttttaaatctagagacaagcacattgcaaaaagattttttttttaattatcaggtattaaagacaactgagaagtgttatactgaaatacttaaatgacataatttaaagattaaaatattgaggtaagtgttagggtataggtctcacttagaaagtacctgatttttgttcattggattcttaagcacactcattagaactcaaatattagacataatcaatcaaccacttttaaacattatttattgaggcccatttagaatcttggcaaggtatgatgctggatgttacagagaatagggtgggtattgaaaaacaacaataatgaaaaataggacaggaacaaacacttgggagtttaaaaaatatggaaagctattggtctaatttgaaattttctttttctggttctttaagatcattcagtttatgtgtacaactgtattttgaggtagaaattgggatatatatatgaggcattttaaactgaaccatctttaattaataatttattctaccccaataataattaatattctagcctaccaatagtaaattcaaaattgtggtctaacagtatgtaagatactgcaatttcacaaagtataagatacaatatttctcaaaaagaagcatatagtctcatatcggtaagtaatcacctgactatgtgacgttaaatcagtgtcatttattgataattacacaccaaaggaatgcagcattttagagtcgtaagagacttccaaaatcctctaatctggcctcttacatgatttcatggaaaagatgtttgaattaattcaaaataatggataatagggtgaagacattccctaataccagcaaggagatttctactgaattaactctcttctagtggatagctcaaggggcaaccttttttatacatacaaatcaccctttgattgtaacctcttacgtaagttttcagcattagagaagaaatatatttgcctatttctaactttatagagaggattgaaattgacccagtgctccatctcatctcatgccattcaaatcactacacagattccgaaaaggagtctatgaggatgaagtggagtgaaaatgattaaaagaggaacttgctagaagtggtttaagttaagtgtgttactcaatgatcttcaggttgataagctcaactttagtattatctaagttatttatgacagtttcacagataaacgtatatgtggtgctttgaaaattgaaaaacgatgctggataggaaaacaggtggcaactgaaatattcataatccaatgtccctttaccttaatcatggactaaacaacagtttacagtacagtgtgtgattatattaagaatatgactaaacatttatgttcatctagtagaaaataggtgtgaattttgaaagtgataaatgactaccttggtggtattgtaagagctgtcaccaaaaatgagcaaaaatgatacaacgttttgttgtgtctaaatttttattcaaacaatataatttcttttgtaacatatgtctcattttattaaattcattttatgtgccacatattgccaaacagctcacattcaagtacttcaggagaaaaagttgtatctgctttgtatattgaaaataatcataagtttcttcatatgactagggattcaagctgaaaaaaatgagagatgggcctgttaacgtggatgaaatctcaaattaaacaaaaaccatgattaaaaaatggtgagagtaagcacgtgaaaagatgttaaacatcactaaccattaggaaaatgcaaatcaaaaccacaatgagacaccacttcacattcattagaatggctgtcatgaaaaaaatattgcaacaacaacaaaaataacaagtgttaacaaggatgtggagaaattaattggaatctttgtgcattgctgctgcggaagaaatggtgcttcctcaaaaaagtttgcatagaataactacatgataaagaaatgccactgctatgtatgctaggtatatactcaaaagaatggaaaacaaagacttgtacatatacttgcgtgccaattattataccaacattactctcagtagccccccactccccgaaaagtagaaacaactcagatgtttattgatggatgaatagaaaaacaaaatgtggtatatacatgcaataaaatattatttagccttaaagaggaaggaaattctgacacatgctatcccatagatgaatcctaaaatcattatgctaagtgaaataaagcagacacaaatggacaaacagtatgattccactaacactatgtacctaacacagtcaattcatggaagcacaatgtagaatagtggctaagatggtcatggaagcacaatgtggaatagtggctaagatggtcatggaagcacaatgtggaatagtggctaagatggtcatggaagcacagtgtggaatagtggctaagatggtcatggaagcacagtgtggaatagtggctatgatggtcatggaagcacagtgtggaatagtggctaagatggtcatggaagcacagtgtggaatagtggctaagatggtcatggaagcacagtgtggaatagtggctaagatggtcatggaagcacagtgtggaatagtggctaagatggtcatggaagcacagtgtggaatagtggctaagatggtcatggaagcacagtgtggaatagtggctaagatggtcatggaagcacagtgtggaatagtggctaagatggtcatgggagcacagtgtggaatagtggctaagatggtcatggaagcacagtgtggaatagtggctaagatggtcatgggagcacagtgtggaatagtggctaagatggtcatgggagcacagtgtggaatagtggctaagatggtctggggagacggaataatgtgaagttattatttaatgagtacgaaatttcagtctggaatgatgaaacgtgtcaggacataacagtgatgatgtttgcactgcagtgtgaaaacccttaacaccactgaactgtacacttaaaaatggttaaaatgatcattttatgttacatatattttatcacaacaaaaatagaatattttaatcttgacaaacgtaaccacagaaaacaacttacaaaatagaatttcagaaatttttgctaaattggaatacatgctgttttatttctacgagaagatggatagtaggttatttggagctgaagaattataatgcagcttccccaaattgtgatctcctatgtggcagtggttagaaacaaataaaattcttatctcttatccttaaagaaaatcgaaattaccacacatgtatttattcagatagctgttctgagttagacggcaaaatagagcttttattaaaaagtaggatatattaaatttaaacatatataatgtgtagatcaaacattcaaaaagcagaactaattaaaaactggataaacattttagaccatattaaaaattttaggccgcctttctaaagtctagattacattggattaccattgtagaattgaagagtggttggttttgaattttacagttgtaattgcaaacttgcaaaaatatatattttaggtgctactatttcttaattttcattttgtaaattaactagctcttttgaacagcatttttttttcttagtatgatgcctatgagaaaaactacctgccttggaggaatttgtaatagagaaagataatatgtgtgtgtgcgtgtgtgtgtgtgtgagtgcatatataaatatttccatatattatatgaaaagtgaagttgaataacaagagaagtttttctttgctaaggaaaaaatacatttgtttttcattaagtaaagattattatactggcattattttgttcttacattggttttcagaaagttcaatggcatattccgctgtatgagccatgcagagctgcatttatctactgtattatcttcctcccttttttctagatattccttttttgtctgtgtttttcttcctgctggtttagtgttatgcatatcttattattttactatgcaatttcttatcttgttgtacccaagcgagttagtgagaacgccacactatgagatgaatcaagagtcctttattaagccggcggccaaagagacggctaacgctcaaaattctctcggccccgaggaaggggcttgattaacttttatacctaggtttaggaaggggagggggactcaaatgcaataattctacagaagtaaaaacatgcaagaatcaaaagaagcaaaatggttacagagagataaacaatttaaaagacaaatggttacaaaaagagcaacggtaccaggtgcaaggctctaaatctttcattataattagatacagggagtatgccggacaggaactcaaggctttatgttttctctctttaagaaaaatcctgggaacttcatacattgttggtgctagtaccttatcagttcattgggctcctttgaaatgctgaggatctgcttacacaggtcaactcctggcagaagcgggttgggtaaggagcccttagtgtcttgtaaattatggggtcaattggagtttttccggctttcccagctagagagagtcttatttacatgagaagcaaggctaggtgattaaagagacaagcaggataaaattcaaagtagcgagttagagtaaaaacaaggttaggcatttcaatcttaacgtcagaagattttgaggttaaataataaaaccaaatctaataaaagtaaattataaaattggtcacaggaaaaaaagggggaaatagataaatataatgtaaagagccaaaggtgagttgaatatagtgctgtactgaatcccgagttgggattaacctagacttgcagctggagttcttcagcaagctgtgatgtctctgacctagatttagctatttgatatgagatcttgtaataggtgaattttgttatgtgaagttgtgggggatgaagttggaaaggactttttatgtgacctagaatcatctgtttgtcatttgaagtcagatgaactattctctcttctgggaatctttcctacttctgcctattcatatttagggtaaatgattattgtgtttatctgagatgccctatggttatgtttgaatattacttacctgtctcaacaatgtttaatacggtagccactagtctatgttagactattgagcacttgaaatgtaattatttggggctctgagtttctcaaatcacatggttggaataaatttagactgcatacatgtggagggacagacctagttatttgattcatctttcccatgatgaatttaaacttttaaatttttttgtcagacctatgtcaagacaagtttcttttttctttctttctttttttttttttttttttgacagagtctcgctgtttccccaggctggagtgcagtggcacgatctcagctcacttcaacctccacttcctgggttcaagtgattctcctgcctcagcctcctgagtagctgggcctacgggcgcaccaccatgcccagctaatttttgtatttttagtagagacgggatttcaccatgttaaccaggatggtgtcgatctcttgacttcatgatccgcccgcctcggcctcccaaagttctgggattacagacatgagccactgcatccagctgacaagttttttttttaaatttgttgcattggttaagtttttttgtcttcactgtgcttgtactctgttaaggtcctagatttaatgcacaagcctcagttttaaccaattagttttggtaggcccaaagctcactggctctgtaagaggatcagaatctaattccttgatcagatatccaggtccagtgctcctctgctcctaccccttgtcaccacggctcttgcaatatattatctgtgtgtgtgtgtttgtgtgtgtgtgtgtgtgtgtgtgcgtgtgtcgtttcattagaaatctctaggtgttattttaggattgtttctgagttagcgtaattcctgatttgggggatcaagaagattttattaacagtattcagtgtccagtggaatgttgcttaggatttgtaagagaggaagaagatcaaaatagtgctttctgaagatttttctggttgtttgcctgtgagcatattacaaaggaaagacagtcgaacaagatgccatttatttaatggctttgatgatgaatgagaggaaacttgttttaaactgaacacaaatctaaagacaaatttactaaatataatttgtccttttcagatctatgtacagttactctcccttacaacgatattaaaaactctcacagacattttttttctcccaagaggattacattattgagaaatgtaaggggccttaacacttgccggaataattaatattttgtccgtcatctatctaagatgagttgtctcgaacagttctgtatctcatgtggctttagtttgatcttagaatactggcttagaaacctagggatagcatggtctggataaaaaggaaggtctgtaacaatgattgaggctattggtctatattgcaaaacattttgcacatttgtactttttaaagtttctcttttttattttacattgatgctaataaaaaggcttttaaaaaatttaccattatgttctaataaaagtccttgctttgatttggaaaggctaagttatgagacagccacataattttcattaatatcaatcatgtgtacaaatattttagcatgaattcttaaaagcttaccacgatttgagcacagttttgttgactgatgctttcaactttcaaggcagaagatattcaaaagtagcaaataccctctccagacttttttctctgaatgtgaaaagcctataattagcaagtattttgtcacttggtaagggaaatgcttcagagataaacaactcatggactgtgaaacactgtagcagaattccaaacatttagatttggaagttttttattcattcgatatttgagtgcctgttaacgtgaatatgcagtgctgaattggacagattttactctaatggaattaagaatctggaagagaagacagacattacatttatgattatagataggatatactgtaggtaaggagaagtgttgaattttctgaatgtttatatcaaagtaatttaggtcaagattatgattcacaaaatgtggttctcagacaagtagcattaacatcatcaggaagcttcttagaagtgcaaattctaggctccacccaagacatactgagtcagaaatactggggatggaactcagcaatctgtgatttaatgttttctaggtggtgctcatggctcaagattgagaatagctgttctaggtcagagtttctcaacttgagcactattgatatttgggccagaaaattctttgttacaggagtctgtttcgtgcattgcagtttgtttagcagcattcctggcctctaaccattagatgccagtagcatcccccagtagtgacagccaaagatgacaccagaaattgccaaatatctccagaaggcaaattcttattagcagttccctgcttcccctcccccacattgccccaggcaatactcaaatgacttgccctgccttttatcttatcctatagtgtgtggtaaggtgctctgaaacaggacaaaggaattccaccatgtttattcattatgaaagaagtaaatttgagcccaagaccagagatggtccaagttctggtcattttagtctttcattttttgccttgttttcaacctatttttcttctcacttcaataaatactcttatatattaatcctgttttatccttaaatagtaacacattctgtttatgttctaaacttagtgatttgatgaatctcatgtaattaacatgacggttagactcaggcacctgcactttccaaagatctttgaacataattaagaaagtgaagggcataattttaatagtaaatcaaaatattctcattgatgaattatgttataataagtctctgtcaatcacagattctcttgggaatttgtttctttccaagaagtgctgagtctttctctgtagttactcatctattatatttcaaaagtgtttctgaatccatggttatgaagtaggaatatccagtttcttatctgtctgttaaccaagttccaaagtgttttagttttctgggttttagactataggtggtcctgtttgagattgctaagacccaagtagataagagtagttgcatttaaaaagcagagattactgcaagtatagaagtaatgcattttggtaggtttgcaaacatatgtacactttctaaaatgtctagatagctgtgtacctatggaattttttcacaggttagttttgctggtaggcctataacaagattcaattatcattaatatttggctcacattagctaactcataagggtcagtgatatggtttggctctatgtccccacccaaatttcatctcaaagtgtaatccccgtgtgtcaagggaggcacctagtgggaggtgattggatcatgagggaaattcccccatgctgttcttatgatagtgagttcttatgagatctgatggttttataagtgtggttaccctgctctctctctctttcctgtcaccttttgaagaaggtacttgcttctcctttgccttctgccataattgtaagtttcctgaggcctcctcagccatgcagaactgtgagtcaattaaatctctttcctttatgaattacacagtcttgggtatgtctttataggagtgtgaaaacagactaatataagaaatttgtaccagaagtggggtactgctataaagataacatgaaaatgtggaagcaactttggaactgggtgacaggcagaggttggaacagttgggagggctcagaagaagacaggaagatatggaaaaatttggaactttctagagacttgttgaacagttttgaccaaaatggtgatagtgatgtggacaatgaagtccaggctgaggtgatcttagatgaacagtttcctcagagatgaggaacctattgagaactggggcagaggtcactcttgctatgctttagcaaagatactggtggagttttgtccctgccctagagatctgtagaactttgaacttgaaagagatgattttgggtatctggtggaagaaatttctaagcggcaaagcattcaagaggtgacagagcataaaagtttagaaaatttgcagcctgaccatgtggtagaaaagaaaaacccattttatggggagaaattcaagctagctgcagaaatttgcataagtaatgaggagctgaatgttaatagcgaagacaatgaggaaaatgtcttcagagcctgtcagacctccatggaagctcctttcatcacaggcctggaggtctaggagggaaaaatggttttgtaagatgggcccaggaccccactgctctgtgcaccactgggacttggtgtcctgcggcccagctgcgggtctaggaggtctaggagggaaaaatggttttgtaagatgggcccaggatctcactgctctgtgcaccactgggacttggtgtcctgtagcccagctgctccagctccagccatggatgataagggccaaggtacaactcaggctgttgcttcagagggtgcaagcgccaagccttggtggcttccatgtgaagttgaggctgccagtgtgcagaagacaagaattgaggtttggcaacatttgcctagattttagagcatgtatgaaaatacctggatgtctaggtagaagtttgctgcaggggcagaaccctcatggaaaacctctgctagggaaatgtggaagggaaatgtggatttggagcccacacacagagtccccactggggcacttcccagtagagctgtgagaagagggccactgtcctccagaccccagaatggcagatccatgtgtaagaattaaagaaagaagaaagaaacatgaaaagcagctcaacagtcaaagacacttttattttttaatataaacctgagagggacttctgaccgatttcagtcaggagcactctctcttacagactaagagtatttaaggattcaggtgggaaagcttatcacaggctcggaatgtttctgtgtctctttgtcttgcttctctgggagagagactttttgtgtctatttccatatatcttcctgaagctgcaggcatacccgtctgagttgcttttacctttcctatcttagtgcacctaaagggaaagggatgtgcttattaggtccactattttactggggcccattgtattagtgtgaagtttggcgattaccaacacaccttcccccttccttctgtgcctgagctgccttatctgtgttttactgtctgctcattctggctgcttgttgttaaaagagaagtgatttccttgaaatgcacgaggttagaaagggagctggaacttaaaacagtggtatttgaccaggatgacagtgctcttgctctatcaccatgaacagcttgtaatgtgcacctggaaaagctacaggcactcaacaccaacccatgagaacagacgcgggggtggaacactgcaaagccacagtggtggatctgcccaaggccatgtgaatacaccatttgcattagtgtgtcctggatgtgagacatggaatcaaaggagctttaagatttaatgactgcccccactggattttggactaggatgggggcctgtagcccctttactttggccaatttctcccatttgaaatggggacatttaccaaatgcctgtacccccattgtatcttggaagtaactaactggtttttgattttacatgctcataggcggaagggacttgctctgtctcagatgagactttggatttcagacttttgggttactgctggaatgagttaagactttcagggactgttgggaaggcatgattaaaatatgaaaagggcatgagatttgggaggggctaggggtggaatgatatggtttgtccctgtgttcctacccaaatctcatctcaaatataatccccatgtgtcaagggagggacctggtggtaggtgattggatcatgggtacggttcctcccatgctgctcttgtgatagtgagagagttctcataggatctgatggttttataagttgtggtgtcccctgctctcttggtctttcctgctgccttttgaaccaaagggacttgcttctcctcatcttctgccatgattgtaagtttcttgagatctcctcagccatgcagaactctgcgtcaattaaacctctttcctttgtaaattacccagtctcaggcatttctttatggcagtgtgaaaatgggctattatagtcagtgagggtcaagcatgttttatctcaaccaacaacagattcttgggtaggatggcagtaatgcagtttgataccaaaaggtgatggataggatgatgatgataataaataatatgtaataagaacaaattttagaaggatatgtttcaaagagtacagaagtttgttagacctgactggtattggatagacataacattgtttaagttcgacagaaggagaagatccaccctgtgtggggaacaatgagaacaggtctgaggtatggtgaatgagattgttgatttatgggaacggtgaagttttggaaaatacacagaatgagatgtggcatacttgaaagattctattccagggaaaacatacacacactggaaaatggagatctcccttagagactcgggatagagaaagaagcagctaaaaagaattgggttctatcagaataaaataccaccagtcaataagaagataatcaattaaaaacaggctaatgacaaacactaccataagatgataacaaaagtctacctgcattaaataaactgcacaattgtactttaatgtagcgggaggtagaacatgtacccttgaactaaagctaaagccaagtgagccccctcctcccttgagtatcatctgctagtatgggagaaaaataattcaagacataatcctgatcataaggaaaatagaatccaatgtttgtaaaacttgctatataaagaaaagtattgcttactattgctggacaagaaaaattcaagatatgaaattctgatcattaaaaaggatcccaaaatttattaaaatattatgtgtaatgaaaagataataaatatttattgaatgaattcctcaattttcctatgaattgagaagtgctcatgaaaatgcataggtaaattataaaatgctattccatttcattcagggctctgctgagctgaaataccacagagatccctttccagactgaattgtttgaaaaagttctccctatcactttcttcatagcacatatcatttgaggttttactatttttctgtccttcactagagaataagcaccatgtggtcagtgagttcatttgttttaacttgtggtctctcatacctagaatagttctggccaaatagaagacactcaataaatatttgttgaatgaataaatgaataaaaaaacttcattaaatattttgaagggattttcatataaaagaaaaagaaatgctgaacttttcagcaaagtaacccatgtatttgagataaaactaactcctccactttaagtttgatttacacaaaaaaattgtacatttttaaactataattgtaacctgataaatatattttctaaataagttaataaattttggaaaacatttgatgcaagatatactgtgagagagccatgagatctggccagttgaccatgttactattggaaatgttaataaaacagtaagattgctgatgttgctttccattagaaaaaaatatcagagaaacatatgctaaggggataaacaaaaatgaggagtctagagtctacttgatcttagttattgagacaattctattaacaagagagtggggggccaatataatgtggtctattaacaagagagttaaggatcaatataatgtggtccttaactatatccttacataatttgacacatgaatgtgcaacatagtaaagcattagtgactttatcatgatgagcatcagatttaggatcctgtaatgaacacatcccagtctctcttctagctaaatattgaagtcagaatggagagattgcatcctttggaggcttgacggagactttgattgccatttggccttaagctccatatcaagctaacatgaattagaaaattattcccacactgctgtaaaggtgaagccatagactccatgtcagatcctcggcacatatgtaattgagtttgtgccataaatagcaaggtagtacagaagttacgtgaaaattagtctgtactatagttacaaatatgtatagtaaaaattgtgattaaattcagggcattttaaacttgagttgtccttttattattcggagacaaatatagtaaaatctagaggagtggttttaccccaaaagcccaagaattattcatcagcagaacaaaggcataaattgaggcctcttgaatcccaatccttttgtactctttaatacaggtactcttggatttatggtgagtttatgtcccaattagcccatcataagttgagaatatcataagtcaaaaatgcgttaaatactcccaacctaccaaacattatagcttagtctagcctgtcttcagtgtgctcagagtacttacattagactgtagttgggcaaaatcacctaacacaaagcctattttataataaggtgttgaatatctcatgactgcatgtcactgcctggaaaaagataaaaattcaaaattcacagtacattgaaattgtgatggttttatatcatcgcacagtggaaaaattactaacttgaaccagcataagttgaagaccatctgtatatgacacttacctgcagagaatcatctggattctaactgaataaagccctcaactgagatttttttattgcgaaactttgatttgaaacacagtgaataaacatcaaaatataaggtacaaagatacaagtcaatactttgaatataagaaaagcaacctttgacaataagattccaagaccaggatagtcaacattactctttcatcgtgactttaggatgaccaaggcaggcacaatgaagataaaatatggcatatccttgttcttcttcagagccatgagtatttgctttttgtttaaaggtgtttttagcagcttgaagaagctgctaaaccattttttgactctgaatgttcaggaaactatgttgagctctgaagatgcaataatttttaagttatctacatatatctctctctttcttaccaaccatacatctgtgcaccatgttagattttatttgttatgattctcaaaataggagataatgaaaatattaacagactgctgtttagtttataaaatgctgtttttcagttaatattaaattctgaacaatatgactagtattcttatggttgtcttactcatgaggaatctgaggctcatagattgtaatttgacacaaattacaaaccttctaaatggaaaagcacaagatagggatttctgactccaaagccagtgtttgtttgtttgttttcttactgtgttgcttgtagcatctacttacaggcattattattattgcttaaaaaatcttgccatctgtttacattgacttaccactttagaaaccatttgctaaaaagttgacagtataataaaagtattccattattaaggatgaataattagaactagatgcgaaaggtgaaagggtagagtttaaatacatataattcattatttaagaaacttctaataaagaagattcttttacaatatgactgactataccttccaaaatttcagtgaatgttattaaatcagcatcctcaaagatttcatgtctgccaagtgttgcagacaaaaataaaactctttgaaagcatcttgccacttgtctctagctcctttatgtgatgaaatgtttgtagatttattataaaatcataatttccattttagtattttcataatactatatttgatagaagtcacttaattaaaagtgttgtcaagggaagtcagctgaaaattaagaaagcacagacagctgcctctgttgctaccatgaaatttatgtcttttaagaagtactttattctcattcaacaatgtttgcatgttggttaatttcaaatgtatctttcaaatttatgaatgtataatttttattaaacaaaaacattataaaaattaacacataaaagtgaaatactcatgtttttatacagttaaatttagaataaatgtaagttttttgaaggaacaaagtatcgtttgtataggagagaaagaatgtgtgtatgtgtttgtgtgtgtgtgtgtgtctgtgtctgtgtatctgtgtttatagaggtggtgaaaatttattaaatccccccaaaatggaactggatatgacattatagtgtatttggtctacctagaccaccttacttgtcaacaaatgggagccaggagactttaaataagtatcttaaggtcacatagtatgttagtagcagagcagaactagaacagattttctcattctcagttatcttttctcattactcttcttcttctttagttttatttgttatttgtgataatttacagtgcatttgtgaattgacatgcctatgagacttctgttggcctactttgcttaatcctaagagggctattacatgaggacatctgaattgagaaaggcaggaaaatgtatttaggtgtgacattaatttgtgacctatgaaagtgctgtagcatgcccccatatctaggccttcagtttaaacaaattggttaaataggggctgtggctcccacactctctaattcctaaggcttttctctcccatcccaatgtaagtcaatgctgattgaacctcgttcacttaggagtgtccttgtgactgccttctgggtataaatgctcaagataatgatgacacgtatggtaactgtattctcctgtattctcagagatgaaagtgaactgtgattctgcttgcaaggtatctgtgcctgcttgtattcttccccagcatttcccagtctttctgacttttccatagatcttcatcatttccatagacatttgtcttccttctttttttaacttttacatgtcatatgggagtggcccctgtaagtatcatttgttcttacccaactttctctatgacataagaaaccttttaaatactgatcaaaataattcaggcaatgttctttaataatataaaatataagtattgtgtttcagatgaatcagacatattcgtttagtaggtcagattctccatatcattatagtgatgagcatatagtaggatttatggaaatacttcacttacatttcccttatggagatgacaatagtaagaatttttactttttttcttacctttcactacgtaaggatgagcttggattacttattttaaaatccataattaggcatttccaactactcaatatggtttatataaacttactaggaatatctgttgaattaaaaccttaccttatgtttgattttaaatgtacctgtcttaatccttaaaataagaagggtacatttttttcaattactcctcacttaagaaaagatattcttgagtagttatttataataaggagatcatggactacttacattttaactcaaattcttcttaagtgtttacatttttaaatattgattattgctagaaggaactcatacattaaattggcatactctttttttattcttttcttgccttattttcaattattctataaattagaaaaatttttttcttagaataaacaaaatcacagtgttctgagattttgcaaagtctatgtcactgaataacagtgaatatgatttttccttatgaatgagaatattttctctggcaaaaatagaattaaattagaaatcaactacacaaataaatttgggaaaccctgaagtatttggaaatttatgaatatatttctaaaagaggtcacaagaaattgtaaaatattttggactgaatgaagactaaaatccaacatttcaacatttatagaatgcaactaaaacggtagttttgggggaatttataattttaaatgtctattttagggaagaataatattctcaaattaatatccctagcttaatcttaagaaacttaacaacagaaaagcaaagttattcaaagcaaacagaaggaagaaaataataaagattaagatggaaatatacccaaaagttaattctttaaaaagaccaacaaaactgacaaaatcttacctagatttactacaaacatgagagaaaacacaaattaccaagactgacaatgaaagagatgacatcattaggaccctaaagacattttaatatattataaaaatgttattataataatttagataactagcaaaaatggataaagtcatggaaggacccaaattaccaaagtggggtcaatgagaatttgagagtatgaataaaactataaaattgaattagcaatttaatatcttctctaaaataaaagccctctatctcatggccttattcaaaattctgtgaaatatttaaagaagaaatagtagtaatctttcctactggtaccagtaggaaccataaaaatgtattttattaataggctagtgtaatcctaattctcatatcagacaaatgcatcacaaggaaacacaaccaaacagataaataaacaacaaaaactacagactaatatttttcataaatgtagaggcggaagtctttaacaaaatattaacaaactaaattcaagaacatataaaaagcattatacactgtgaccatgtaggatatattccagacagtcaaggttggtttgtcatctaaaagtcaaataaggtaatacattatattaacagaataaagtaaaaagcaacacagtgaactcaatatacagaaaaaaattgaaaaattctaatagtcatgataaaaactctcaaaaaactagtaataaaagggaatatctttaaaatgacaaacagtatttagttcacagcggatataatacttaatggtagagaatgttaatttaatatttctattaaaatctgaaatgaggcaagaatgtctgttctcatcacttctattcaacatagtactgaaagatctagccagtgcattaaaaaggaaaaaaaagcaattaacagcactcaaattgaaagagaaatgtacaattattttacttctcagatgacatgatcctttatgcagaaaatacaaagagatccataataaactacttgaactaataaacaaatttaccaatgtcataggatacaagattaatataattgtatttctgtgtactttcaaggagcaatctaaaaatgaaattatagaaaaattatatccatgacatcagaaataagatacacaaaaaaattaagaatataatgtaaatgtaagtataatatatattaatatagcataattataatgaatatgaaataaatataaatatgtaaaataacatcacaaactaagaatataaataaaaaagattaaaaaatctgtgttaaaaactacaaaatgttgctaaaacaaattgaagatctatataaatggagagacattccatgttcatgaattgtaagtctccatactgtgaagatggcaattctcccaaaattgatctatacattgaatgcaatttctatcaaaattctaagtaggctttttttggaggtagaaatcgatgagctggtttagaaatttatgtgaaaatgttaaggacctaaaacagccatgacaatatttaaaaataagaaaatggccatactgcccaaattgatttatagattcaatcctaccccaatcaaactactgttgactttcttcacagaattggaaaaaactattttaaatttcatatggaaccaaaaaagagctcacatagccaagacaatcctaagcaaaaagaacaaagctggaggcatcatgctacctgactttaaactacaccgcaaggctacagtaaccaaaacagcatggtactggtaccaaaacagatatatagaccaatggaacaaaacagaggcctcagagacaacaccacacatctacaaccatctgatctttgacaaacctgacaaaaacaagcaatggggaaagaattccctatttaataaatggtgttgggaaaactgtctagccatatgtagaaagctgaaagtggatcacttcctttcaccttatacaaaaattaactcaagatggattaaagacttaaacataagaccaaaaaccataaaaaccctagaagaaaacctaggcaataccattcaggacataggcatgggcaaagacttcatgactaaaacactaaaagcaatggcaacaaaagccacaattgacaaatgggatctaactaaactaaagagtttctgcacagcaaaagaaactaccatcagagtgaacaggcagcctacagaatgggagaaaatttttgcaatctatccatctgacaaagggctaatatccaaaatctacaaagaacttaaatttacaagaaaaaaacaaccccatcaaaaagtgggtgaagaaaatgaacagactcttctcaaaagaagatcattatgtacccatcaaacatatgaaaaaaagctcatcatcacttttcattagagaaatgcaaatcaaaaccacaattatatatcatctcacgccagttagaatggcaatcaataaaaagtcaggaaacaacagatgctggagaggatgtggagaaataggaatgcttttacgctgttggtgggactgtaaattagttaaaccattgtggaagacagtgtggtgattcctcaaggatctagaactagaaataccatttgacccagcaatcccattattgggtatatacccaaataattataaatcattttactataaagatacatgcacacatatgtttattgtggcactattcacaatagcaaagtcttggaaccagcccaaatgcccatcaatgatagactggataaagaaaatctggcacatatacaccatggaatactatgcagccataaaaaacgatgagttcctgtcctttggagggacatggatgaagctggaaaccatcattctcagcaaactaacacaagaacagaaaaccaaacaccacatgctctcactcataagtgggagctaaacaatgagaacacatggtgaacagtaaggggaacatcatacaccgggacctgtcagtgggtgaggagctaggggagggatagcattaggagtataggagtaatacctaatgtaaatgatgggttgatgggtgcagcaaaccaccatggcacatctatacctgtgtaacaaacctgcacattctgcacacgtaccccagaacttaaagtataataataaaaaagaaattggaggaattgccatacccgatttcaaaacttactataaagttacagtagccaagaaaatgtggtactatcataatgacaaaaatataaatcagtgaaatagaattgaaagtcaagaaataagcccttaggtttatggccaattaattttaaaaaatagcaaggcaattcaatgaaggaaagaatagtattttcaacaaatggtgataggaaaattatatatccacttgaaaaaaaatgaatttagaccctgataccacaatagaaaaaaaattcagaatatagaagaccttaatgttagcactaacactataaaactttttagaaaaagactaccagagaatcttttaccttgatttagacaaatattcttaaatgtgatatcaagagcatcattcataaaagtgaaaattaataaacttgacttattgctaagagaatgaaaagtcagggagaatgtatttgcaaaccttatattttatgaagatcttatatctaaaatgtattttaaaaaatcaaaacaaatcaggcgagagattttaacaaattttttaccaaagaattcatgtgattgggtaatacatacatggaaaggtgctcaccatcattatctttcaggaagtgcaaattaaaaacataatgaaatacctctatatatctacaagaatacctataatcaaaacggcaataccaaacattggcaaaatgcagagagactagaacctttatgcattgctggtggaaatacaacacttggggagacaacgtgacagtttcctaaaaagtaaaatgtgtacttattacataacccagtaattccactgttatttatatgccaatgcaaaacgagacatacagctatgcaaaatcttgtacaggaatgtttatgacaacattctttatatacttaaacactgcaaacaatacagaattctattaactagtaagtggataaaaatgtatatatatacagtggaatatgaatgattaacagtaaaaagaacaaactcctgtggctactataagatggataagtcctgaaaacattatgctgattaaaagaagcatatgtactgcgtattgtatgattccattcaaatgaaaagtccagaaaagccaaattttctagagacaaagaacagattgcctggtgattgaattttacctatacaatggctaaatttttaagatatgaacattacacccccaaaatgagagacatggaaggagtaatcagagccatttccagatgtaatctcagcctcttaccatagggatgatatggactggaggaaattctcaagaatgtgattattttaattatgatgggaacaaggtaactataaagaatagaaaacaaacattttagagataagccctgattccatttctgtattgaatttacagataattgtttagacgctacttttgatcgaaataacatatataagctatttagacttaaaagaaaaagacatgtagaaagtttcctctagttgaacaaaaccttcaactgctttctgtattcctattttgactctcgaaaagaaagaaaatgaaaaggcaaacaatgggtgaagagcttttattcaactacattcttttacctgatatgttttaggttcaataaaagccaattttatgagtttgtggatatatatacacacacacatatatacgtattgagcattgcttgaatattgagacttttggaatgatcaggtatagtaaaataaactctgatatagaggactagaaagaaaaatgactttttaaaaataaaacaggtgcatttgtactttgaatgtacagtgtatgtgtcacatgtttatatgtgatacttatgcacattacttatatacgtatttaatgttaaacatgtaaaatatacacactaagagtacatgttttgtttatattttgctaggttctcatttaatcacaaggaatattaacctaattaaggcacaacattttctttttgccatattctaacagcaaagataaagagacactccagtgtcatgttatatgtatgacagatgcttacagtcaacaattgccactgcaaacagcattggttagcaactgtattaaacttagacgtactgttggtgatttgggtggacttaacagttgtcaaaatttggggtaagtcagttttcatcttgtgagtttgatttttttttttttttagtctgggtcatgctctgttgcccaggctggagtgcagtggcacaatgtggtctcactgcaaccaccacctccctcgttcaagtgattcgtctgcctcagcctcccaagtagctggaattacaggcacgtgccaccacgcccggctaatttttgtatttttaatagagctgtagtttcaccacattggccagggtggtctcgaactcctgacctcaggtgatccacccacctcagcctcccaaagtgctgggattacaggcatgagctaccacgcccggctgtgagtttgattttaatataaagttttctaaccacatgaaagagtttctattgttttgattaccatggctataattgatctcaatttttttcatgcaggcaatattagcattgtgatacataaaatatatactcaatttaattctttgggagtgaccaccagctctctccttaactgactactctctagggataaaaaagcaatttgaggaaatttgggccatgtaaagatattgtaaacatcaaaattgtgagaaacaaaaactaaatataatatgaattcaaattgtgtgtgtatattcacataaaatctgtccaacttccaacagttgaatgactggaattatttctaacttctgagatttgatattggttctatgactaaagaacaagctggaaaggactaccatgttattagaccacccataggtaaaattattttcaaggcttacatagtaaaacatatattttatatatatatatacacacacacacctttgtttgcattattatactagatattgtggctataaaacagaatagaatatgaaatttgtcctcaaggatgtaaaagtacatttatctttttctttcttctcagaacattgtaataaatgtagtacattttcctctgtagaattagtaaccatagtattcatttgaatattcagtggtaatgtgagtttcaatttttagctttataggtactttctagtgactgatataataggtttcagaggcccattaactctacctggtgtccacataagtaatcacatactctgttgtatgaatggcttacatttttcataacgacctgcaaatataaaacctttctttctctccctattagttattctctcttggcacgtaagtagaagagacataatgaaataccaggagttttatctatttgaactcaagtaatatctcccaaggtgacattcccatgggtaaaaaagcagtcttcttcatttttgtgttttaaaacacttatttagatctagacttaagtgttgcttttcttgtaggagtttgaaaatgcttaacagtctaaagttaattattactctttacaaatatattcaagtttctcaagttatctaactggctattcttcctggctggttgcctgtagattttcttagaaaatttgctactttgacagggtagagttacatgatattgtccctactgttgtattctggatgtctctcatgctgccctatcagaatcccgagaaatggcataggaagatcactggagggtacactgagcataaattgatctggctactgccaggtcttcagaatgagaagagggaagagttgctgtgtatgttgagcaattaaagtactatcaaatgaatctgatcacaacatattgcctggaaatatgctatattgctatggcaaagtctattttgtatatgagattgattgttccacatgagggcaggaacttgtctttcataatgagtcagagaagtgacaatttctcgttatatttcagagttatgggggattgactatagtgtgtattctgcagatatgcctcaaagataaaaataaattaaatgcaatggaaacgtgttgatgaatttaaaaagttgttatttaacctattggtatttattagctcccctgtggcttctatgttgagaataaaaagatgaataaaacaagtttacactaatatcttgtcatctcaaacgctcaaaatagtcagtcttaaatgactgatttgatgcttttttttttagtaaaatttaaaacctagtgactaaaagggcattctttggagtggcagagatgttctatgttttgattgtgatggtggttacatgcttgtatatatttgtctattaaattttccattaaatactgttaacatgggtagattttgttatatgaaaatttgactcaaagtaagttgatgttggtcaaaaggtgcagtttcagttacacaggatgaataagttctgaagatctttcatacaacatggtgactatagttaaccgatatcatattttatacttaaagactgctaaaaagaatagattttaaatgttctcaccacacttataagcaaaaactggtaactctgtgaagtaatggatgtcttaaccagtttgattgtagtaatcatttcacaatatacaggcacatcaaaacatattgtacaccataaatatatacattttttccaactatacctcaataaggattagaaaataaataaaaatggtttattttctctctcattatataatagatgataatgtgtaccagtactgctggtaaaagtattataaataatatttgctaatatatattaatgcagttacagattattttccctttgttccgatgttctgattgtggaataattactgagtatagagttaattccaggcttgctctttctctctgtttctttcttctctttcactcacataaactaaaggcataatttaataaatgccctttcgtgtggacctttggaatgtcttttattccattaaaacttagagaaattgaatggtattttaggcctttaacacattgtttaatttactattttcttctaaagaattgggatttcaacaatccaaaggtgcctcaagcttaacatgttcaaaattgaactccctattgttcctcactaacttgtatcttctgctctccaaacttctgtgaatgataccgtcacttaccagtcacacaagacagaggtctagaattcctctatgcctcccttttcctggtcctttccctatgaactgtattccagtcccatcagtccacctccttgacacttcctggatccattcccctggagttactgttgtgcttccatcttaattcaggctccatttatcttttacctggcctactgcttttctacaattaatacttctgcagcagcaaggtgatcactacagtgtcaaattggttatgtgaactcctaaagtttaatcttttactaatttcccatttcctaaaaggttagaatccaaattccttggtatgacacacctccatggtatgacatggaggacaaggtcctccatgatatgaagcctatccacctcttcaatagcaattatagaacccgaccatatttaataagtttatttaatattgaatacagaatccgaaaccgtaataggttgtctcacacatatataaaataaaagtattataaagaatatttgctaatgtatatttatgcagttagtgattattttccctttgctctgatgttttttgtttttgttcctgcttttgtttgagagagtttcactctgtcacccagtctggagtgcagtggcacgatctcagctcactgcaacctctgcctcccaggctcaagcaaccctcccacctcagcctccccagtagctgtgactagaagcacatgccaccatgcccggctaattgttttgtatttttagtagagttggggttttgttatgttgcccaggctgctcaaacttctgagctcaggcaatctgcttgtctcagcctccgaaagtgctgggattaaaggtgttagctgctgcgcccagcctataatttttaattaatttattttctgtatctggaataaccttacacaaaaagggtcatctagtgaaatagctactctgtgccagtgtcaactgcatttggaaattactcatattcctctgagggataaatgaccaactcttccttataccactacagcatcctatttctatacatgcattactttgtaagttctttgcagagcatttccataactgattcagctctgagattcctataccacacctggcatctgacacatggtaaacaccaaatccttgacaagttactgactactatttatattttatgtgatttatttaagctgaactaattatgatgctttcaaaatttaaatgtgtatagttttaacatcaatgaaatccagaagagatagttgaagaaaaggtttctgaggtttttaggatggaaggaagcataggtaaaagatcataaaactgtcagcagctttttaaatatatagagtgttacataaacacatatctgtccataagtagtgatgccataaaattgtctatccttcacctcaaatacacaaagtgtaatttattttttctttaacggatttggtcttccttatgtgatgagtattgggatatcatactttattttggtccatttgcgtctaatctcacattagtctataatgctgtagattcaagtatccctttaggcagtgctgactttcttggttaaaaatcctgtctctcaaccagtacctctctacctccttaccctaaagtggcatctgagggaagggttgacttcctaacctcttagtgctgagataagatccctgcattgtgatgccctgcgacaaatgtgaattccttttctttttttctcctatattcctgcagttgctggtctctctgttggtcataatggctgagctcctaaactgtttgagtccagagtggcatatttcttgtgtgtccagtagagactggtggtcctctcttgcctacccaagctcttcgtggctcatgatggtgacataggctctctgaatcacggcttcaattgttatagggtcctcactgttcaacctccaggccactttgccggtccaactctactctagattaccctgaaatgattcaaatgataccatgtgtctgtttccattagtgaagggtgatgtgatagagcagtcccagtcataatgtctttggagctagaacaagaatataaatggagattattagttttacattaaatatttaactcatgaatcaatctgacagtttgttaaaaatatatgctatccttctaccttgacaaaaatatcttcttaatggtctggagagccagatttgaattgagaatcatctgactccttaaagttctgcagccaaaaaaaaaacacaaacaaaacaaaacaaacaaacaaaaaaaacagcggtacaggagaactagcacctgacacctgccctgtgtctaacactaggttttttttcacccctgaggctgttagcatcttgagagcttcaaacaaacatgtgtgaatgccccagcctgtatgttgaaactgtttacacatgctactcctcaggcccagagatgcccatataggtggctcaattcattgcaaagaggaaaaacccagggaatgaactctcacagaccagggcagagggcttggagaggaatgttcagagtcctgggtagggatggattccagacaggtataatatcaataggtaattatggcctccccttggccttatggaatccttgccacatgagtaggagtgagctagaggagggagagagaaccctccaacgtgcagagactgggtgtccttgatctaaggttcatacttactcagttcacagttagatttccataatctcaagtctaaaaggctcctatctaccaacgtcctttcttaaggtcttctgtttaattataccatggtctcgttctccttttatattcttaaaaagaacaagtcactaacacagtctgcctgggaacagtacactttttggtaacatcttagagcagaaaatatatttaaaaagcaacaatataaagaggaaattaattttctttttgtttcctaagtattacttaatacttacaatatatttttcctattacttatataggtattgccatcgacactttgtaagttgtagtaatacacactcataaattcagcagttaactcctctagctttgcacataatgctgttatttcttttaaaacacacggttatcctattacgcatgtgaagcttggaataaaatatatattaaaatatgactaaaaataaaaacagattttataggctttggaagtactatactttaaaagatctatatttttcacactgaggaaggagaactactgaaataaagtgtactgtgtcaaagtattacacacagaatatgagaaaggcaatattgaatatccttgcccaactgtggaaaattaaggattaagatttgaggaaagtctaaatgcgttaaaatggaaaatgtaggccaggcatggtggctcacgcctgtaatcccaatactttgggaggccaaggcaggtgtatcacctgaggtcaggagttcatgaacagcctggccaacatggtgaaaccctggctctactaaaaatacaaaaattagccaggggtggtggtgcatatctgtagtccagctactcgggaggctgagacaggagaatcacttgaacccataaggcagaggttgcagtgagccaagatcgtgccactgcactccagcctgggtgacagagtgaggcttcatctcaaaaaataataaaaaataaaataaattgaaaataataagcacaacattttgtcatttagttgataaatctacagtttagagtttgccatgagtcaaacactatggtttcccaagtgaattaactttcataataatttgcctttttaaaaatgataattacccattccataatgggtaattacaggtaactatattttaaaagaactcactattactgtttatgtatctactgatttgaaagtgaaaatgtaaaaatgtttttatcaacatcaccaagatgtttttctacaaattctaactgaattgtattctactctataaactgatagacctttgctttagaaacttatgtggaaataccaatccagagaaatcctgtctccctatctcccacctgggactctttagaacctttagtattcacttcaaaacgtctgatatgggaattatagtgtggtgttctttaacttttaatatcacagatcccataatttggagcatcatgtaacattttgtagagctactattcctcagaacacaatttgagaaatgttctaatagagtcattttccacaaataggaaagtcctacaaatattattatactaaatcataatgaaaactagtctgatttgatgtattaattataaagtagtttagattactttaacttttggtgattattgccaaaacttctttcctattaagagtattctacaataaattaaatttagtccacatataatgctgatcatatgtacagtaacattaacatctaagatgacagagtaatatacatcttattacttttgtgaaaaatagaaagggttacataataaaatattaattgtctagaatttggctttctagaggcttgatatactgtgatgtagcccttaaaatatggatgttcttgtcagaaatgtagttctatattgggttctacttttgttgtcagtatgactggggcaggttactggatctctttaggtttgtttactcacaggtaaaatggtggttaataatatcttcctggaagagttgtgatactaaagagatggcctatatatgtaaaccacctggcacctggtagaagcattgattactcttctaccattcattttctttgaattcaattttttttgaggaagtacttcttggtgacagtgaagttccttaaccctcaagaaaaagagaaaactcagattcttggaggaaagaatgtagcactctcttttaccttgttataaaaggttaaattttcccttcagaaatttggaaggcgtggggaaaatttaagggagcaataaagaagaaaagcagaaatctgaacatagatgacaataaaaagaaatgataaatacatgcatgtacactcatgcatgtttgcacacacacatgcacatgtgtacacatgcccaacaaccacaaacacatccacaaataaaacaagagacactggccaggggcagtggctcacgtctgtaatcccagcactttgggaggctgaggcggacagatcatgaggtcaggagttcgagaccagcctggtcaagagaccagcctggccaatatggtgaaaccccatctctactaaaaatacaaaaattagctgggtgtggtggtgggcacttgtaatcccagctactcaggaggctgaggcaggagaattgctttaacccgggaggcagaggttgcagtgagccgagatcacaccattgcactccagcctaggtgccaaaacgagactctgactcaaagaaaaaaaaaagagacactgaaaaaaagagaaaattaactgtgatgctcactattcctgtgaggttgatttaactgctacctgcactgcaatttaatatgatgaacttaagagtacaaggcatctggaattaatctgaaaaattattattagaataatgacacttgaagtgttgacttttgacttcaatggaatatttattaactagaacattctgcatacaggcaggaccttgtgaagcaaaatttatagctttgtgttcaggaatgattacaaacaaagatagcagaatcagggctttattagagtactatgcaacagttttgctaaatatatgttaaaggaatctgaaagaataaagagaatcatgaagattatcctaaggattctcctaaggaaattgagctttctgtgctacccagagaagggcccagatggtactggattcccgctgtaacttaaagggaagcttttacaatgtctggaacctgcgatgtcttgaaaatgaaggtagaggatgtcctcaagtttcttacagcaggaacccacttaggtggcaccaaccttgacttctaaatggatcagtacatctggaaaaggaaaagtgatggcatctatatcctaaatctgaagaggactcaggagaagcttctgctgaccgctcgtgtcattgttgccattgaaaactgatgtcagtgtcatgtcctccaggaatactggccagagggctctgccaaagtttgctgctgccactggagcaactccaattgctggctgcttcactcttgggatgttcactaaccagatcctggcagcctttcaggagccacagcttctagtggttaataatcccagggctggccactgtcctctcacagaggcatcttttattaacctgcttactattgctctgtgttacacagattctcctctgtgctatgtggacattgccatcccactcaacaaaggagctcactcagtggggctaatgtggttgatggtggcccggggagttctgcacttgtgtggcaccatctcccatgaacatccatgggaggtcatgcctgatctctacttctacagagatcctgaaggattaaaaaggaagagcaggctgctactgaaaaagctatgaccaaggaagaagaatttcaagatgaatggcctactgtagctcctgagtttgctgctactcaggctgaagttgcagactggtctcaaggtgtgcaggtgccctctgtgcttattcagcagggctctgctgaagactggagcactcaagactgccacagaagactggtcttcaactcccacttctcaggccactgaatgggtaggaacaaccgctgagtggtcttaagctgttctttcatagatacttttttttttttttcctcctgagacggagtatcaccctgttgcccaggctggagtgcagtggtgcgatagctgactacaacatccacctcctgagtagctgggattacaggcgtgcaccaccatgcccggctaattttttgtgtctttagtagagatggggttacaccatgttggccaggctggtctcgaggttcttaagctacatggcaataaggttgttggaaaataaacattattgtctaaagaaaataggaaagtgaaatataaagttatgaatttaaagctatttagaagggcatgaagaaagaccaaagaagtattcaaactgaaattattctaaaatgaaatttcaaattaaatttaatctagtttcacattgctgattaaattttagatgacactgtacaaagctatctgggagagtgaaaccacatgacaaatttactggttgtcattttctactttgtgattttagcctataatcagttttaaagttctgatatttagagtgtgctgcctctctacaactaagacctttttgactttaactttatatctgtttaaagaatcaatatcccttcagaggttctacgattacagattgaaattactttttaaaaagttaacgtcccaggttctattaagactagtttccgaggctgagcatggtgggtcacacctgtaatccgagcactttgggaggccaaggtgggtggatcacctgagagcgggagctcgagaccagcctgaccaacgtggagaaaccccatctctactaaaaatacaaaagtagccaggcgtggtggcactttcctgtaatcccagctacttgggaggctgaggaaggagaatcacttgaatccgggaggtggaggttgcagtgagctgagatcacaccattgcactccagcctgggcaacaagagaaaaaaaaaaaaaaaaaaaaaaaaaactagtttctttaaaatgtggatatcagttaaaatctgtgtattgtattgcattttgaatgcactggattaattccatttttaaatgaaacgtggaaaatcttgttttaagatgaagaatccttgctaaatagaatctctgaaccctaaaatggcttttttaattgggaattttcaaaatatgaatttggttagttacaacaaacaatcaaaatccttacctatgaattgccctcttctaaagcaagaatgttcaactcggatatctagtggtaaagcaaaaagagatttccctgttagtcctcttacaggttgtgggcattgcttatttgactttgaaacattaaagaagaatgtgtttcagggcagacatgttggtaaaactgtttctgttacaaaaattttagaggacaacccaacgttttaatgtggtgaacctcatttgtcatcctgtcactgcaccatcttttttcagtttcatcctggaccagggtttcatggcacagaaaaaaacctggccatcaaatcatagcatatgaacaagtagatggccaaatgtttgaaagcataaacatgcctctctcattgggcactggttgagagggttcgaagcccattatttgtaattgcagttcagactaggagaaaaaaaactccatccagaagagaaacgattggaatgtttgtatggatttgggttttgatagcttctgtaacattccatcactgtttgtgtgagcattttccaatcagctgtcccaacatcaaagccatttctgcataatttttttttctctatattgcttgttcttttcaaaatttggttttctatccccttctcccccagtctcagtgagatttgcattttaatgtatgatctgtctaatgtattgtctatttcacttctaacagttacatctcttacatttacaaatgtacttcaccatatttcttccagacagtcacctttcttattattttactgccctcatgacataatattgtaactatctgcagctcttggacaaagagaacctttccagaagagctttcaactttttctcttttgccttggagtatgtctctctacctctattatgttcttgtaagtgataaatatcttatgagttttttttgtctatccataatgataatagaatctgagcattaatatttattttggtggaccatgcacaatttctaaaatccataatttattttcataaccaatattacagtaaattcattaagcatatacacggtttggaggcttattggcttaataggttcaatccatagaaaaggataattcactacctactcaaaagcatcctaccttgagagtcagctaagtggggaaaggaaaaatatgcttttctcttcagacagcctttgtatcagtgtttcagtaacatacatgactacttattgccatttcatttcttctctttgaatattgcctttgcctctcctgggacagtagagttaatcttataggaatacctaattccacgaattccttagaatagtataaggctgtgcagtgattggcccttaccttgctctctggtctctccttccaccaccggcttctgagaggttcgcagtcttacatcttgaaaaccactttcagtttgtgaaatggaccaggattcttctttttcttttctttttctctcttttattttttttttgagacaaggtctcacactctcacacagactggagtgcagtggcatgatcattgctcactgcagcctctacctcactggctcaagcgatcctctcacctcagcctcctgagtagctgggaccacaggcatacgctaccatgccagactagtctttttttgtttgtctgtttttgtttgtttgttgttgttgttgttgttgtttagagacaaggtctcacgctgttgcccagactggtcttggggtcctgggctcgagtgatcaactgcctcagcctcccaaagtgctaggactgcaggtgtgagccacttcactcagccagaccaggattctttcaagttttggtgacattacttatatttttccctatttttggaatattctccccatctgattgcactggaacagctttctaacatttttttcaaggctttgttaaaccataaaattaaaaaaataaaaaagcattccttgagattaattctcctggctgtgttgtgtaatccttctaggtgcctgcatgctctgtgcttatctttaatgataataaccctttatgtgttttaaatcatttactcattctgacaagcatattcagtaaacaactgtagttatcatcagtcctattttatgaatgtggaaaataatgcaaagaaaattaagttacttacccaatgtctcacagctaatggtagaacaaattttgaagaggtctgtgacaggactgtccattagaagtcgaatatgaactaaaaatgctatgcaatttttaaaaaatttcaagtagatatattacaaaagcagaaagaaacaggtgaaattcattgtactgttattttattctcaatatcatttcaacatatgacctataaaaatgagattttttttatttcttcacactgagttttcatatccagtgtatattttaaacttaaagcagatcttgattcagactagcattctagaacacatgtgcctaattgctacctttgttcaacagcacaagtctttactcttaattacagcacccctctttgtattgaaatagttttatttgcctacctgccccattctactgtgtgcatctttactaggtgaagaatgtgctattcatttctttatttcaagtatatagactagttagtgcctaagatatagaaacaataaatgcttatggaattttgttgctgcagtattgcagtggcttcagagtacagagatttttggatactctttttagcaatcattgtagaattgaaaatctaaaagattcaaaacgcttgacaaaatttctagaaggcatgtatttgcctgttagacttctgagcaggtcatacaagaagattgggaagctatcctggaagttagctgtagcccctacagacagtagaatatgccaagtttccactttaagagtgcatgtaaatgctatgacttttactaaaaccacatagcaatataataaatgaaaatgtggtctaaacgtgttctggaacatttcctaattattataacatattgtattttgttatcattatttagtagaaaaatgggatcagaattagcattgtaatattattttggtaaaattatgaatgggatcatgcctcatacatagtagatgcctaataattattaatctgatttgatttatttgagccagggttagtaagttcaacttctactggtttctgttatttatttgagaacctattcaacttgccatcattgggacaagctgggacagttccttaaaatgaactctattagagtcaaattgttccatctgttttccctaaatgaaagaagattcccttgatgctagtcaatgagtgagggctccttgactcagaaccagatgcaagctttataccagccttccatttcagcccaattacattcttggcagcctgtgagactcatggggtaaactttttataacaattatcaatatcagccaatttttcagaatgggcaggaataaacttcaatggctccaggatgagttttctgtcttccaaaggctctgtctggctggctgccatggagaatatgtaggagcataaaggctgctgttttatgtaacactctagaaatcagctaactttatgactacttagagttttaagattttatcaatctaaattaattatttaatattggcttaggctacttttttgtgacatagagaacattatttttattcctgtgatacagacctccaaggtgtgtgtgtacattacatagcaatgactggagtctggtttattgttgactccctcataaagctattgtggacgaaagagagaaagcatcttactgatgggatatagaatcagtgaaaacctggaaccattgaattcccattgggttagtgtgtgtatattaggatgggaggtttggggaagtagagtggaaattgatggtgttatgagatgacgtcgtgacctttaactcaggaatgactcaatcctgtcaatatctaacaatccctatacattgtgatctcaggtagattgttttgcaatggcaatggcaattatgaacacacactattattcactgaatgttcataatcacaaaagggaaattgtttcttaaattgcaataggacaccaagatttttctcaaggttcaagagaaaacttttctgttttgagaagtttgaaaactaaaacaaagaaagcattcatatgataagagaagaaagtgagaagacacgagtcctctgtcctcttagccaggctctaatgggttcagcccatggaggtaggaattagaaaacatcatagaccatatcgacttgaactgcttagaaattcagccacagattttctgaagcgtgagaacagactaatacaaaaaatcacttttgttatgcattagcaaagaacttggaggcattttgcccatgccttatggatctttggaactttgaacttaagagtgatggattagggtatctggtagaagaaatttctaaggagcaactgattcaagatgtggccaggctgcttctaaaagcctatattcgtatgtgcgagcaaaaaatgacctgaaactggaacttatatttaaaagaaaaacagagtgtaaaagattggacaatctgcaccctgaccatgtgatagaaaaaaaaaaaaaagcccatttaacagggaggaattcaagcaggtggcagaaatttgcataagtaaagaggagccaattactaatagccaagacaatggggaaagagcctccaaggcatttcagagacatttgtggcatccactcccataataggctcagaggcctaggaggactgaatggtttcatgggccaagcccagggccccactgccctgttcagccttgggacactactccccatatctcactctgctccagctccagccagaaaatttgcagcctagtcatttggtagaaaagaaaagccatttgcaggggaggaattcaaacaggctgcagaaatctgcataagtaatgaggaaccagttgccaatagccaagacaatgggaaggccttgaaggcatttcagagacctccatggcagtacttctcctcacaggcccagagacttaggaggtctgaatggttttgagggccaagtccagggccccacggacctgtgcagccttgggacactactccctgcatcccagtcacttcaccactagccatggctcaacaaggcccaggtacaactcaggccaccacttcagaggatgcaaactgtaagtattggtggcttccaagtggtgttaagcccatgggtgcacagaatgccaaagctgagccttgagagctcctgcctagatttcagagaatgtatggaaaagcctggatgtcctggcagaagcctgctgcaggggcagagccctcatggagaacctccaggaagccaatgtggagggaacatgtggggttggagtccccacacagaatccccagtggaggactgtctagtggagctgtgagaagagggccaccatcctttaaaccccagaatggtagatccaccagtagctttcacatttagcctggaagagccacaggcactcaacgccagcccatgagaacagttgtgggggctaaaccctagaaagccacaggagtggagctgcccaaggctttgggagccctccttttgcatcagtgtgacctggattgagacatggaatcaaagaagattattttggagctttaagatttaacgactgcttttctgggtttcagacttgcacagagcctatagcctctttcttttgaccaatttttccattttggaaagggaatatttacccaatgcctataccaacattgtatcttggaagtaactaacttgtttttgattttacaagctcatatgcaaaaggaacttgctttgtctcagataagactttgagttaatactggagtgagttaagactcggggggactcttgagaagatatgattgtattttgaaatgtaagagagccatgagatttggaaggtgccaggggttgaataatatggcttggatttgtgtccatacccaaatctcatgtggaattgtaatctccaatgctggacctaaagcctgatttgaggtgattggatcaacagggcagattttcctttcgatgttgttttgtgataatgagtgagttctcatgagatctgatgttttaaaagcgtgtggtacctctccactttccctcattctgcagccgtgtaagacatgcctgctccccctttgccttccaccataattgtaagcttcctgaggcctctccaaaagtagaagccactatacttcctgtacagcctatagaactatgagacaattaaacctcttttctttacaaatcatccagtctcaggtatttatttgtagcagtacaagaacaagcaaatacagagagccaatgcatcacatggccagagtagaagcaaaaaagttaggggtaagatgccacacatatttaaatagccagatattgtaagatctcactatcatgaggacagcaccaaggatatggcactaaacaattaatgagaaacctgccaccataatccaatcatctcctaccaggctccacttccaacattggagaatgacattcagtatgaaatttagagagtacaacatccaaactgtgttaatactgttacagaaatactcaacaaaatactaacaaactgaatttagcaacatgtttaagagattatacaccatgacccactgggattattcctgtgctaggatggttcaacatataaaaatcaatcatgtaatacactacattaacagaatgaaagataaaaattacatgatcatcacaattgatacagaaaaatcatttaataaaaaattaataccctttcgtgatgaaaactctcaacaaactaggaataaaagaaaactatttcaatatattctaagccacacatgagaaacccatagcacacattactcgcaatggtgaaattgctgaaaaattgtccctgaagatcagaaaaatgataggatgctcacttttgccacttctattcaacatagtactggaatttctgatcaaggaaattagccaagaaaaagaaataaaagccttggaaactggaaacaaagaggtaaaattacttctgtttacacatgatatggtcttagaaaattttaaagatttccaaaaagtttgttagaactaattaaaaacaataagcaaagtgacagggtacaaagtcaatacacaaaaatcagttgcattttgatacactaacaaacaacccaaaagaggaaattaagaaaacagttctatttgtagtagcaccaaaaggattaaaatatttaagaatttagttatctaaagagataaaagtcttgcatacaaaaagctacaaagcattcctggaaaaaaaagatatatattaatgaaaagctattccacatacatggattgagagacagtattgttaagatgccaataatgtccaaaacaatatacacagattaatgtagtccttataaaaatcccaatgattttttgcataaatagacaaacccttcctaaaacttatatggaatcttaaggtatccaactaatcagtacaatcctcaatatagaataacaaagcattgagctcatacttcatgatttcaaaatttactgcaaagccacagtaatcaaaacagtgtggtaatggtgtgttagccctttttttgtgtgttgctattatacatataaagacatacctgaggctgggtaatttataaggaaaatgggatgtataggaagcatggtgctggcatctacttggcttctggtgaggcctcaggaagctgtcgatcatggcagaaggaaaaagggtagctggcatctcacattgtgagcaggagcacaagagtaggggcaggtgccacactcttttaaacaaccagatctcatgtgaactcggagtgagaactcactcattaccaaaaggatggcactaagccattcatgagggatccagccccgcaatctagtcagcttccaccaggccccacctccaacactggggattgcatttcaatgagattgggaggggagaaacagccaaaccacatctattggcataacaacagacatatagaccaatggaatagaatagagggcccagaaataaattctcaaatatgtggttaacttattttcaacaagggtattgagacctcagtgaggaaaagacagtactttcaacaaatgtcattgggaaaattgtttatctacatgcaacagaatggaatgggattgttaactaaaatgatgtttaaaaactagttctaagtgaatctatcacttaagtgttaaacctaaaactataaaacatttagaagaaagcaggacaaaagcctcaagatttgggtttggcagtaatatttcttggaaatgacatcaaatgcacagacagcgcaagaaaatatacacaaattggacttataaatttttttaagtgtgcatcaaaagacatcatccacagagccataaggtaatccatagattgggaagaaatatttgcaagtcatatctatggtaagggattaatatccagaacatatagaaaatgcctacaactcaacaagaattacaaaacaaacagcataattgatagacaaaggagttacatgaatatttttccaaaaagatatgcaaatatccaataatcatgaaaaaagatgctcaatgtcactaatcattaggaaaatgcaagttaaaaccacaatttgataccacatcacattcactatgatgcatactatcagaaagaaagtaaatagaaaatatttggtgatgacgtggagaaactgaaagtcttgtgcactatttggtgggaatgtaaaatattatagctgctgtgggaaacagtatgatgtttcctcacaaaattaaatgcagaattacggtatgatctataaattattcttctggataaatacccaaatgaattgaatgcacggtcttaaagagatttttatgtacccctattcatagcagcattattcacaaaagctaaaatgtggaagcaacctaagtgtccattgatggatgagttggataaacaaaatgtgggatatacatacaatgggatgttattcatccttagaaaggaaggaaattctgacatatgctacaacatggatgaaccctctaaggttcatccatgctaagggaaataagctagtggcaagtagacaaatactgtatgactttatttatatgaggtacttagagcagtcaaaatcatagacacagaaagtaaaataatggtttccaagaagtgcagtaaggaatgaagagttactgtttaatgcgtacagattttcagttttgcaagatgaaaggggttctgaagataggtggtggcaatggttatccaacaatatgaatgtacttaatactgctcagttgaaaacttaaaatggttagtatggtatatgataaattttatattgtgtgcaatttactataattaaaaaatgaggaagaaacacagtttaattttaaataaaaacacacatgtatatatatatataaatttttgatgtgataaaatatggtctcccataagaccaggaggacttaatcaaatttgctccagctttatgaccttctttagcccctctgaaagtcatcactccatatttgctgaggttcgaagttgggtgtgcaccagtctggtagagactagctccacttttagccatatgctgttgtgctgctaccatggtttgtcacatttgttaactgacactgacaaggctgaaagaagcagtggcatgcaccttgcaggggagacatgaatgcgtccacacctgaatttgccatgttcagacctcagttatttcccctaatagaacaaattctgatagtacgaggaatgttgagagctaccccttcaactatagcctctgggtgctgcaggccataaccaggtcgggtgtgtgctataagggggtggagatcaaggagcaccatcccctggggcagctattaaaattttcacttccaaattgtatttaaagtctgtctcccattggaattctgggtcccccgttctcttaattgtatgatgttagtccacttaattaagttccctggagttcaattttctttatgtaaatataataattttgtttatgtaaatataagaattaaatgagataagtataaatgtctaacaaaatgtccttcccattgtaggtgttaagaaatggccctttcttttaatgtactgcataactgaatttttttcttactgactaggttataggtgccttttcccctcctcgttcctacttcctagggacatggtaaacacttaacaagtagtttattgagattgaaaaaatgtattcattctattgttgcttgttggttctatcagaacactttgataggaacaaaaatggtgattttctatatcatatctgtatctttgaagacagttatctacccttttatcatatttgtgcttccagctgtgccaagagcaaatgttatagagttaaaacgcaggtgaggtgaggcaggatctgcagactgtggctcttatctgcttaatgatgtgtacagtaagtgtcatattaggaagaagaacaggaaggctcatctttttgaagcagaaacataatgttcagtgtaaagaatctcatatcatgttttctaaaaaattgtatgcgaaaaaaatggtgaaataaaatgcttaaggagagacatctgttctctctgattctttaacccactttagacttggagaagcaaagaaaagcaacagtttaattcttgtgtttctttaggtccagatctttagctcttgcataaaagtgagcaagctgccatctgtgcaaacaggtggcttgaattaaatatgatgctaagtattagaacaattatatttctagcatggcaggaagtgacaaaattaagaaaacccagggtacttttagtaagatgagatatgtgagccataaactgtgtctaagaagataaagtatgaaaatatatgttcaaaaggagctaaacaactgcatgcttcacatttgcctccggtaattcaagaagagatgaagtgcaattactcatatgcccctttcaacatactactgtgggtcaactgggtccatcatagaacagtattagggaagatcttttatgtcatgaataaagagttgctcaactgtggcttaattatcatttaatagtgactgtcttagcttcataaagtacattcttcaaagcttgaagctaagtagaaaggcaaaagaacacacaggttggagggtaagcttaaggaagcagtataagcatcgttcattcattcagagataaccggtattgcagtaagtaggctggacttggaatcgtaattcaggagttttagttgctgattcttcactgggttcaatgaggcttttttgatgactttttcatcatggatgaaatgaagtcgttggacaagatgacctccttggttccgtacagctctacaaaacattttggagccaattattttgtcgacttttttctcaggggtcctttatagaaacagtgtataaaatttactgataaagtaattaactctttttgacagttttccttcagttagattaatattttcagggttcatctatcttgtactatgtatcattatttcattctcttttattgataaaaatacttcattatatgaacatatcacctgcatatgattaatgtatttaatattgtcaacttattcagaatataaatactatttgtagagccctatattagtagaggtaaggatgagaatattcaaattaaatgagaaggattacacatagcaactataacacaagaacaaaccatttttgtttcaaagttggtaaaaagttaaactttacttggagtagatgaaacaaataccaggcaaatggcacattgttttgtttcatattacaccagtagttgcggttttacagccaaaatatatctaaagttttgtatttgaaacttttgtcatctcagttgtttccgttttggtcatcactattttttcatataactttaaaaaataaatttattgatataaaatcatatagcataaaattcacccttttattttttaaaaataatttttattgtgtctatttaatgtatgtatacatcataatgttataagattatatatatatatatctgcatacatagtaaaatagttagtataggggaacaaattagcatattcatcatctcacatagttacccattttttcctccttgtgataaaaacagctatgaaatttgcctttttaaagtgtacaattcattgtttttagtatattcatagaattgtctaaccatcattgctgttcatttctgaaatgagttcatcatctccaaagggaaatctagtacacagtcatttctgattttcctccccccagtctctagcaatcactaatctactttctatttctatggattttcctatttgaacatttcctatagattgaattatgccatatgcagctctttatgactgtcttctttcagttacattcatatttttaaggtttattcctcgtgtaccatgtatcattccttcattcatccttactgacatataaataccaatattattatatggatatatcacattttatcaattaatcagttcatgatactgggatggcttcctttcatcatagccttactaccttaacatcttcttattttttcttttcattatgtgtgggtgattaacctctgggattttactctattcttgctttgttgtctcatccagtttatatatgaattccaaaatgctcaaaatgggaatacttagacactaattcaatgagatacataaataccaaatatatactcagtcttattcaaagtaattgggtaaataaggaaattttaatattttcttctaaaaagagtacacagccattttgatggttaatggtagtatctgataacaggatgaaatgtaggtagggtggagaattaaaaaatgcttactaaatcatggtagttacgttacctccatcatcatcatactcaagatcactttattggatacatactctgtggaaggtacttcatttttaatatgtattatagtatttgatattaaaacaacttattttggacatgtaggatttttaaaaaattatttcagatgacaaaagtaaattacagatagctaatgtaaccagctccaaaattaaatactgttatgtagaagagtcagaatttcaacccaaatctctgaaacatactccttcttcgttctttcactgcctgatatgtctatctgtctgtctatctatctatctatctatctatctatctatctatctatctatctatctgtatgtgtatgtgtatgtgtgtgcatttgtgtctgtgtgtgtaaaactaatattgtttgggaggaattcataattcatagaagaggtggactttcaaattgcccatgatgttagatgaggaaaatttggttaatcgtgatgagaagtgaggcagggtcactagtttgaagaaaacaaccacagcaataaaaaatgtactctccacattcatgttctaacactgattgatgttaagttgtaggtttagagttcagccttactggcagacttacttgtaaattccgactgctccttggccaatctgattattcttaacaactcaacaggagacttgaaactttaatggagatttgtgattctcccagggcgtatatctatatcttctcagcagtgtcagactgatctgctgccaacatgtttttccccctctcagtaaaataaatctctgactacacatcctggcaaaagcacacatttctcctggcaagcttcctcaatgggcatcgaatatcttgagatttcagacaaaatcatttttctccaggggaaacatgactcgtgtagatgacaggaccccagacaaacagcaaactctgctcagaattttaacaattactaaaaacatatttcctatcacagactcatttttttttgccaccagtacacccccccacacacacaaacacacaggtgcacacatacatgtgcacatagtcaattttcctgtacttacctgcattatgaaatgccaaacttatggtgagtttggagaggcaattttttttttttacaaataataccctccataaataaacatagttattatgaatgcacactcattgtgtaatagatctgtggtttgtgtcacttagccaactttgatcattttctgtcatccagaaaataacttctttcttaacaaccaacacataatcaatgcttggcagtaatgggcatgtgatttaggtttgtgcctaattagcacattgcataccactaatgtacagcacaggaatgagtacctggaccatctatgaccaatgaaagcaagggacctcctactgagaaccctggaaaatatagttttggtttttttatgttgtcttgaaagtgacaggctgtagggattccatatgctatagtcattttttgatcatgaagagaaagcttgtctgaatggagccatctgaaagaaaactatggtaagatattagtcatgcccctgatgacaacactgaagtatctgtatcaagtcatgcatgtctgcatgaagccctacatgcagtcagccagttcgggaggtaatctcattcaggcaggagtttctgatacttcaaaaagcaataaatagtcctttagttttctcccacctcctacctaaaatagaaaatggtaacaatgacttatctatcaattcttagctgatcatccttcttctaaaaacattaacttgtatatcgtgtcacgtgcctgtagtcccagctacttgggaggctgaggcaggagaatcgcttgaacccgggaggcagaggttgcagtgagctgagattgtgccactatactccagctgggcaacagagcaagactccatctcaaaaacaaacaaacgaacaaatattaacttgtataatagctgtttacagttaggtaagttacatcctgggcataagaacaaatatgattaagtccattatacaattttaggctcatcagcattttttcttaatcatctgaatttttctcataaactttaacactgttccaaaaaaaaaaaaaaaacaaacaaaaaccttaaagcctacatatgcttgagaagttattttatccaaagaaaaacgacaacctattgcccaaagttattgcctcatttccacttgctattaccttagaactaactagtgttttgatattagtaaccatcctataactatttctttgtaagtattttcatatattttatattcgtgcccttcattcttgggtctgattgttgttaagtatgtgaattttaattattctttctgtcacttcttttaatgttgtttctgtttaaatgaatgcaatactaccaatttattcaactaaatcaattttctatttaattaagtcttactttatggtttaattatatacttggattacagtgatcaatcttctctctagagatttaactgaaatatgcagaaattgataaaggtaaagttatgtcattatgcatttgaagagtcatagcatctgttgtttagatgtatgaattagttttccagacaacaaaattcttcaatactactctatgcaattatgttgagaactataacatctattaatatgttccttttgtctacattttaaatacagccactttttctttgtatatttcagttatgatattgcaatttatttttctttctataatgtcaactgagagtgttaagcttttgaaatagccaatggtgaatttttagtgtttagtgacatagtataatgcctaatctataattttaaggaataaagtctgatctaaaccttgatatgttcatgattgccactgtgtattttataagggaacatattaaaattatcagttagtttcccttgacatgtttgcattacacaaattttccacagtggatttatattattttaaaatcggaaaatataaaaaattattgtctttgacccatatgtctttttcttctatcaccttttgtatgtcaatatgctgatattaaccatgactacagaaatattttcataagttttcatattgcttaagttttactggcactagtaacatatccatctgtccattcaactgaaatgctaatgagaagacattgcatcttgaaaagaaagacatagctttatcaaagatgttggagattaaacatgtttgtcaattggacaatgtcaacaatgcagtttagatgttactttaaaataagctctattttctgcatgtatcactgcagtgtagagttctagacctttgggatcatataaacacatcaatctttatatttactttatatgagatgctcaagtggaagagaagcatgaatctgcttacatctttcctttgcctggtgatttaaatagactggaccattcaacaagagtgttgagtgtatgagtatgaagtctagaaacttttggtaagagttttaactgaagaaagttaatcagttaaagctggtggttatgctactattctgcaaacaacccttctggtgggaaaatatatttaaaattctagagagagattttattttcctcttatgctatctttttgcaaataatccaaagaatgaaatggtcgtgtgaaaattgctgctattcacattttagctacaaatcagaaaaacatcatttagttgagtggctatcaactgctccattatctagcctgaaaaaggctctttatcacaggaagtaccattcataggatcggcacttccacaagaattaataatgattacttacaattatgatgacttttaaataaaaacgaactttattctggttactttttaggtaaatgcttttattttggatatctaactttatcttatttaccagggatttgattcattttttaaaacaacagacaaacagagagccaaatcatgagtgaactcccattcacaattgcttcaaagagaataaaatacctaggaatccaacttacaagggatgtgaaggacctcttcaaggagaactacaaaccactgctcaaggaaataaaagaggacacaaacaaatggaagaacattccatgctcatgggtaggaagaatcaatatcgtgaaaatggccatactgcccaaggtaatttacagattcaatgccatccccatcaagctaccaatgcctttcttcacagaattggaaaaaactactttaaagttcatatggaaccaaaaaagagcccgcatcgccaagtcaatcctaagccaaaagaacaaagctggaggcatcacactacctgacttcaaactatactacaaggctacagtagccaaaacagcatggtactggtaccaaaacagagatatagatcaatggaacagaacagagccctcagaaataatgccgcatatctacaactatctgatctttgacaaacctgacaaaaacaagcaatggggaaaggattccctatttaataaatggtgctgggaaaactggctagccatatgtagaaagctgaaactggatcccttccttacaccttatacaaaaatcaattcaagatggattaaagatttaaacattaaacctaaaaccataaaaaccctagaagaaaacctaggcattaccattcaggacataggcgtgggcaaggacttcatgtccaaaacaccaaaagcaatggcaacaaaagacaaaattgacaaatgggatctaattaaactaaagagcttctgcacagcaaaagaaactaccatcagagtgaacaggcaacctacaacatgggagaaaattttcgcaacctactcatctgacaaagggctaatatccagaatctacaatgaactcaaacaaatttacaagaaaaaaacaaacaaccccatcaaaaagtgggtgaaggacatgaacagacacttctcaaaacaagacatttatacagccaaaaaacacatgaaaaaatgctcaccatcactggccatcagagaaatgcaaatcaaaaccacaatgagataccatctcacaccagttagaatggcaatcattaaaaagtcaggaaacaacaggtgctggagaggatgcggagaaataggaacacttttacactgttggtgggactgtcaactagttcaaccattgtggaagtcagtgtggcgattcctcagggatctagaactagaaataccatttgacccagccatcccattactgggtatatacccaaatgagtataaatcatgctgctataaagacacatgcacacgtatgtttattgcggcactattcacaatagcgaagacttggaaccaacccaaatgtccaacaatgatagactggattaagaaaatgtggcacatatacaccatggaatactatgcagccataaaaaatgatgagttcatatcctttgtagggacatggatgaaattggaaaccatcattctcagtaaactatcgcaagaacaaaaaaccaaacaccgcatattctcactcataggtgggaattgaacaatgagatcacatggacacaggaaggggaatatcacactcctgggactgtggtggggtcgggggaggggggagggatagcattgggagatatacctaatgctagatgacacattagtgggtgcagcgcaccagcatggcacatgtatacatatgtaactaacctgcacaatgtgcacatgtaccctaaaacttagagtataataaaaaaaaaaaaaaaaaaaaaatatgtatctctcatgccatgttgtaaaacaaacaaacaaagaaacaaaaaacataccttttagagtgtatggctattttggaaatccaaaagaacagtcttttagttacattgcaatgatcggtgattaacgtttaaaatatagtaagtaaaagatatcttatttgaatgaggcaaacaattaataggctaacacagattccagcaaactttttatttaaagaaccagagggtaaatatttaaggctttgcgggccatattttctctgttgcaactactcaactatgctgttatagtgcataagcagccatgagcaataaatagatgtagctgtgttctttacaaaaacagttcttagaaagccagattagcccaatgctgtagtttatggacccctgatctagtatactgtaaaccaaaaataaaaccctaaggcccccaacagaccaaacagactctctcttggccaagaggaccccagaaaaacctgaaaacctgaattcctggctgtgatgggaagggatgttgaaccctcttctttatatctccttccttttggaatttaagcacaactgaccagcattcaggttaaaatagagatcataagaataacaaaacagtccctttgtggctaattaaaaacaaataaaaggccatgcaaggcaaaggttaagtcccatcctacaaaccaaaaaattttgtaaaactggcgcttttttttttttttaaattaagctggtacaatttgacttaatttctaacctaactacagatagcagaccctgaaggaaacaaacatattttaccccaaaatatattttttgttatattttgaaatggccccacaaaaccatcttttgtagggaaaatttggatctgcagacaatctctattaatgtaaccagaccttccctttcccaagcctttcccagatctaggggagattagctgacagtctgacaactttaatgtctgaaaagagacatttaccatctattctctctgaggcttcatctgcataaaaagagccttggcctttacaaccccctttaatcttgattcaagcatttatttcttctgacttcaaatatttagacaaagtttaactcttgcaaccaattaccaatcagaaaatctttgaccccactgatgacatgtaaaccttccccacttcaagatatcccacatctttaggctgaacccaggtacaccttccttgtatttatttatagttgtattagcctgttctcatggtggtataaagaaatacctgagactgggtaatttataaaggggagaggtttaattgactcacagttctgcatggctaaggaggcctcaggaaacttacaatcatggcagaaggtacgtcttcacagggcagcaggagagagaatgagtgccagcaggggaaatgccagatgtttgtaaaaccatcagaccttgtgagaactcactcgctatcaggacaacagcatgggggaaaccacccccatgattcagttacctcctaccgggtcccctgacacatggggattataaggattacaattcaagatgagatttgggtggggacacagctaaaccatatcaatggttttacctacaattccgatctccctaaaatgtgtaaaaccaaatggtaacccaactcccttcagcatatttctcagtacttcttaagaatgttccctgggccatggtcactaatattggctcagaataaacctctttaaagtattttacaaagtttatttcttccattaacaatgctaagtttaaatttatatatgtgtaaatgtattaaaaattatttaaatgtaatattgtaacattatgaaagtaggttatgagagttgagatttgcaagatagtattaaaaaatattctgacactaaaacactaaggaagaccttattcaaagcaattgcgagagggctgtgcgtggtggctcacgcccatattcccagcagtttgggaggccaagattgtggatcatttgaggtcgggagtttgagaccagcctggccaacatggtgaaaccccatctctactagaaatacaaaaactagctgggtgtgttgactcacacctgtagtctcagctattccagaggctgaggcagcaggatcacttgaacctgggaggtggaggttgcagtgagtcgagatcccaccactgtactccagcctccagcctgggcaacagagtgaaactttgtttgaaaaacaaaaacaaacaaaacctcccccaaaaaacccataccaaaccaaacgaaagaactattgcaatatagagaagagacttaactccaactacagcaaacactgctagaggtacttagagccaatgagcagaataatgcagtcaatgcatggaaaactactaacaggaggtatccagggcagggggagtcttgctaaactggtataagagttatagaggaaagaaacacgaaacacggctggcagttaaagacaggttttctttagttgaaacctgagaggtgctcctggctagtttgtcaggagccctttctcttacagactgtgagtatatatttgttttagggtgagaaggcttaccagaagcttggaatgtttatgtgtgtggataattttatggtgggctggaatgtctctgggaggagaggagattatcttggggcagacatctcttcagccaggaggagggttgtctcggggctagcatcttcctggctggaaggggttatctaggggctagcatgtctgtggtcggggaggagtttggaatgtttctggttggagatgttatttgtggtttatggtcatgctgaccttagccattaggctgatacactttggatttaggtggcttttattaggttgaactttagaatgaggggcatgtccaagatggcaatgctcctgctctgtcaactggattaacacaatttttgctaaaggcaagccatagacttaaatttcaagggtaggggtagaggaatttgatcaagtgtcaaaggcaggaggattctcactaaactgacccagcaggattcttgttaaaggcaggccaaggtcaagggctagttgtgaagtagatggaggagcctgaacaaattttagtcaaggcagatatcttcatcaggagtgctaaatgcatttctaaataacgtcacaacagcaatcaataaataaataagtacatatatatatatgatcgatgtggtcaaaaacttagaggaaacaaaaatatttgctgtgatcattctactggatggggctgtagtacatactctaaaagctgtgaatgactgaatggtggctcaccaaaaattccaccaaaataacctattaaagataaagcatggctgacttaattgcttagtttggtaaaaaagatcactcttgtcacagaaagtgagcagcatatggaaagagaaaagcaaagaagagttgcttataaagttttgggggtatgtagtttgacaggtatttcaataagtggtcttgattagagttgggcatactttgtgattaagagtttaggataggtgaattgagggatgtgagtgctttggagaagctcttaaataggaaacagtcatttgtttgtgctgtatgttgttctgagaaagatatatttatgagccttagatgggcggtctatttttcaagtaaatgggtttttggaaagttcttgaaaaaaaagaaggttatttgcaacttcagcttcctggaaagaatttcctgaaatattaaagtcatatcaatgcagacagttgaatagcaaattgtgttaatgtaaacagtaagatgtgttggtatagatcgtttcaattctcaaaggaacaagaaataggttccttcttgagtttataaagtaattgaaaacccaaaacaaacacatcaaaatggaataaaaaaactcaataaaaaagatcgaaaggaattacatgattaaatattaactggcacaggagttcagaagagagggatattaggtgaatactttaaaggtgttgggaatttaacaatgctttgaaaaaagtgaaaagtttggacaagatctggtgtatttattagtgggcattgtaagaaaatctgagtgggagtgaagttttacatatgtggagaactgtaagccacagataatctggactattttataggctatcggtagataataaatatataaatatatgttaaattttatattttattattaggaagccacaggtctttgaggagtgtttgagataatggtaagtattgtgttgaattgattgggctgtgtaatggtaatacctagagccatagaaaactcttacaaaactagcagtagtctgggtgagtggtcataaagaacaatataaatataggagatgaagatacaggaaaggtgtaaccaacaggatggtatgtatgtaaatggaattttgagggagagtagagccaaaactataaaaagtttaattgtagtactgagttttatatgtctacaagatatgtgatctagcatagaattagaaatatagaactggcctatgggaaatgtcaggacattagttgaatgtttaagaatccatataagaaggtgtgagtagtaaaatagtcactgaagagctgttggaaaaaaaaaaaagcctacagctgagtttggaaggatgcctttgtttagatagcaattgagaggaaagagcatatagaaaaatttgaagaacaaataccagggcaagatagtggttcaaagtcaagagaagaggattgcaaaaccctactgttcatcatcattgttacacactatgaagttgagttaggtggatattaaacatgggggaagaacatattgtatttggttattgcaggtcagtgatgatgctggaagtctgaaatttcagtagagcaaggactgcagctgtactgcagaagatacagagaatagcttgtatggctgttatggagaacaaggtggaaacccctcaggcaaaaggtttattgaggcttactgtgaaagggaaaaaactaggaacagagaaaaacaccagacttaatgtactttttatttatttatttattttttgagacagagtctcactctgttgccaggctggggtacagtggtgcaacattggctcaatgcaacctccgcctcccaggttcaagcgattctcctgcctcagcctcctgagtagctgggactacaggtgtgcaccaccacggctaatttttttatgtttagtagagacggggtttcaccatgttggtcaggctggtctcattctgttgaccttgtggtccacccacctcgacctcccaaaatgctggattacaagcatgagccaccgtgcatgtactttttttctttaatccttttgttttttgaagcagaaataaaagatatttaagagcttagagcgcattgacttgtttataaaacagagcttctctttgcgaaggagaaagttcatctcttcccaaaagtcttgggaaaaaaatgtgcatgcaatgagatcttgaagtagaaataaaggatattgaagccatttctaatggcctcagtttcttcagttaaatatatggatcctggggctcttcaaaatatgaggaaagtttaacattgttgtgagcagtgttttagggagttgaattaggagcctactgtgttttaattgtgagtagctaaatattctagatttaccattgatatatttaattaaagaataaaatcttgttgtttaacaaacccttcctagatttatttgagcatttcctgtgatagtcatttcattttttccacattttatttttaattgctcagctttttttattgagtatagtttcttttaaaacatggaatgctacagaatttcaattgtggatatatcaaaaatagttttaaatgaagattatgtttggattaaagtttctcagagaactgatttgccagagttttttctactttttgaaaactctttctctatgtagagatagattatatatttattgatttaattttaaaacactgaaactagattatcacgtcaaaattaaatgcatacttaaattagccgttagcaagaccaacagaaaccaatatggtgactttttattgttacatatggaagatgaattttgtcggatttcaacttctcagaagactcacagcataacccgttaagcaaagctgagtttattacctataatagtcagaaaagacaacattttacaagagtcggagtgtccagaaggagaggattaaggcgaaatatgaatagggttggaaatctaggtttgagtagataagactgaactttcaatgtgaggatctggtttggttaggcacatttcaagacgtaatagtttaggattggtgaacacagaaaggcaggaatcttgaagtgagttgtttgataattgagccatttacccagttttaggagtttaatgtttctagaaactaattttcagccattttctgaaaaaaaaaaaaaaaaaaaaaaaaaaaagtttttcgttctgatttacaacgttaagttcataaacaagaacttcctagaacaaacagtaaaataatgtgaatgtaggctgcctttatttttggtcctgatagataaggtggatgcagaagtctcagttcttaatttcaataccacattgagaactaaattaacaatggaaaatgctttattatctgctttgtgtggaagaggtataaaatataaggctgcatttacctgaaagattttaaattaggatactatgtttttctttttgtcagccaaattatgggaaaaaaaattggatcgaaatggcagtaatgatagttagggttactgcagactgaaaatacgtgcttagatctcagggtacacaggccagatagtgattctattctgccatacattttcattttaggaaaactgactgagtcgaatgtgtgttcagaataattggctcttaactgtcaaagagttaaaaaggagaaaagattatttaatcaaagtaccttgtagatatgcatagtgccatgctttaagaatatttcaagtactcctaccttaatctttccatgttaatgcacttaagtcattgatctgattcactcatatttgattacttaaagttaaacaaaatatatcatacaacatttagaaatgtagttccagaatgaaggatcactattagtctggtagataactgttaatctagtaacaggagtttcaaaactggggattccactagtgattataaatcaaactgtaaagtaggataaatatgaaatccagaagaccagattataaagaacaaaaaaaaccccaagaaaattaataagggcagatattagtttcttttaaaataattcatgcaaaaatctttattatttattaagctagagaattacatgtgaattttaaaagtttatcctattaatgcaacattgagagtctaacagtaaaatttgcaggagtgtagatctaaaggtatttacaaatctcaattctctgtagatttttctcaaggccaaataattatccaagaaaattgactttaaataaactgatattaagtgtagtctttatcttttcaaacaagcttcacttccttctactttgttctaagggaaatcatgatgaattttctttcgatcacccctaataacaacctatcactcatttaagattttctttcactatgaggaactatggggtcacgcatttctttttctcttctcttgactaggaatcaccattcatactaaaattgctctatggcttttctttctctctaacaccacagacctcatctcaatttaaaattctgcattgtgcttgtgtactcacccaatgatttcttcctatccactgcaaaaaccagttcactgagacgttggtattgcagtaaagaagagtttcagtaacatgagattagccatgtgggagaactggagttattactcaatgagtttccctgaagtcttggaggtcagggtttttcaaggaaagtttggtgggcatgggactagggaatggatgctgctgattggttgggggggatgcaattataaaagtgtggaaaactgtgcactgagtctgcctctggatgggaggtcacaggactggttgagtcatgagtccaggtgaggccagtctgaaaatcatctcagaagaccaacctgaggttctacaacagtactatcatctgtattatctatatataggcgagtcacaaatcttgtgacctctggccacatgacttttgagcagtaagggattatagaaactatagctacattttaggagaattcaggcctctttcataatttcagttttgtgtcctttcattagtattacaagggtggtttcaacccctgaacgaggaggggatgaggtttagggagggactattattattcttgtttcaaggttaaactataaactaaatttcaccaatggttcgcttggccaatacccaagaatgagtgaagacagccagcctacgagcctaaaagcaagatggagtcagccatgttagatttctttcattatcataatctttgcaaagatgtttttgcctgccttttgagagaaaagctacttgtcgagtgttttgttttgttttgctctatttatctccatgatgcaatggaaaatggaaatttattttctcttaatttattgagaaaatattgtaaggatgattttgttagggcatgctatttggctcttgataattcatgatgatatgttcatcacaatcaagaagtgggccagagatgagaatattttaaaaaattcatagagggaatagaagttagaactcaaagttgaggttggactgttgatttgagcaagcattaattgtgagcaggaggacaggagatcaaatcagctggcaagaccaaatgagcattacagatgattggtgttgctgttgagacatgatcataaatatgaatgaaaaggaaaaggaagagaggaaaagaatataaatcaaaataaatatttattgtttatgtaaatctgttatttgttctgcatcaacagaaaggaaaacagataaagttaatgataaaaaaaaaagaacccaattcctttttagctgataaaagaagttcagaaggtgatacaggccttaatttaaagatcatatagaactatcagtccatacggccagcctcagggagtaactgggaaatcccttctttatctccttactttcctccttcctaaaaagtccatttgactttccctgtttcccaggccacagttccaacatgtcactgttcccatgtgattaaggtcaagaactactggccctctgtgttattcttgactctaacaggagagtcatattggactatgtgttttgaattagatactgaagaaaacaaacttcagctttgctaatatttcttgcttcttgtcatataaattgtacgtgtaactattaataatatttaaataatgagagaaggggtcagaaaatcttgttctgccaaaagtgtcagacaccttttcgtgtgtttttgtggctaatctttgtaactcatcatttagtacttgttttataactttgcaagtggagacattcagtttctgagagattgtaacttatacacattcattcactataagtagtgaatctaatctccattaatatcacctttcttcctagaatgagcaggagattagggatgtgtaagcaagaaaaggctagaattgggtaaaattgggtaaaaagattatgatttaaaaagagaacatattcaaacctactttaatgtggctatcttctcttttacctaatcatatatatatatataattatgtataattatatatatatatatttatctccagagtatccttatatcctgtcagttttacctcgttagtaatttcaggcagagatattgttaagatgttttaattttctaacaaatatggccaaacttacctcaaaaatatgtaaaagcaattatctgaaagaaatgcaattatttaaaatgaagacatagttcttctagagttgaaaaagttcattcattgatatagtagtagcctcagattttgagctgcaattgtgcaagccaggtaaaataccacagaaaaaattcacaacccagaagagaattcaagatgctgaataggaattcagtggtggtagaagaattggatccataaataggtctgcatgagaatgattcaatcttaggagacatagaactgttagagttacagtcaactggcagcacttttaagttaaaatactggatcatcatcagtaatggtttactttagagactggaggcacttctctttgcccattttttctcaccacagaatgtgcagcagactgcccatattttaattaattttcatttgttaaaccatgaacctgagtggccctcatactaaccccttgttcattgcacaatagaccatgtgttaggcgggcttcctgatctttcacgagaatgaatgccaagtacagaaatctgcttgggttattgaaggctaaaaatgattattctaatgtgtctgtttattttgcacgttttctcccctacagttactatattatctagtcaatgtatttgtcaattgtgaatgtctttgttgttgcagatacagatgtggtgtataaaagcgagaatggacatgtcattaaactgaatatagaaacaaatgctaccacattattattggaaaacacaacttttgtaagtaatgaataattaattactttatgcatttcagtactgtttagaaagctctctagatgtacataactttctattcttcagctccagcatttgtaaagcatttcaggtgaaaagttggggctggaatatcataagaatcagtaaatctattgataaaaaataccctgtgactatctgcttcattttcttcccgtttactcttgttaataattggagaaatatttccaaaaatagtagttgcttagaaagaataattttcccaatattttatatataacattagtcatacaaataccaaggttaaaaacaatggctcatctagccttatttattattaactttcttttcttctttacttttcattctttctgacttctttctagttctgttgttttctggatcagatagaaaggctttctaaaggtggtcttcagctgaggttgatgtgttttagaatttaggattctgtcagtaccattttacttattttgtatcactgtttcgccaacatggtttaaattattgtttgtatttatattggtcttaatacagactttgtctttctgaaaaatctagtaccctaaggttaggagacttagctataattacctatttggtaagcaataatgaatcagtattgcaaatgttgaaaatctagctacccaacaccaacgaaaaatagtacacagttatttacttactattttattgtaattaaagtttcaatagactgccaattagatgaatgtatacaatacagacaaaatatagtacaagctctcagaaaacctccacaaaataaaaaaataagcaaaattgttggctacttttaaaaatgtattctacttgtacattttaaataaacgtttaatcttcgtatttattatggaatggccctatggaaaaaatggactaagaatattctgtttagtatttttacatattaaggagaaaaggtcattacaatcattaagtgattatatatgtatatcattgggctaaatttaaccagccaactaatgtacattaataataaggtcatcagccagaagaaaaataatgacatttttggttttaaactaattacagggaatcaaagaatagttactttgtgtgcaactctttatggtactcgtgggatgtcaaggatatgtacagcagattgcctactgtctaagaatgtggatttcctttgggagataatactaacccttacggagaattttaataaacagtatacagcagtgtttactatttcttcagtggatggtcctcagggatactagaaaaaagcctagagaatcattgagaaatactgtcaatagtggaaaattagccattagtaagaagataggataggagacggaattccagaattgataatgatgagaaggtatgatgataatatatggattaaagtcagaatgaatggatttttaataaaattagtttggggaacaaaaattgagtgcattttaatttttgctttttcttcataaagtaacataattttatggagattctaggccctcagtagccaagcattcaggttagatatactcagtacatgaattattctattatgtggctgtgcctcattaaatactcatttacacaagtcagtgaggttttcccccatcactaattatgttttggttttccattatttattcattacttttttatcttccatgatacatcaaaaaagaaaccaaaacaaacagaacttttagattattattccattatctcaattcttttgctggtactacacaccatcaccatctcatatcatcgtggttttctccatgtgctaattattgctgttttatctttgtgtttctgtgttatatctttttaaatccttttgaggtctctttctattctcctctacattagccgtgactcttaattaccacagggtcatatttagcaaatattctaatttacttgtcttctaagattcatatgctccctaaggacatttatgtcacaacacagataattaagcaatttataagtcctagaggtgtctaaattcgatgtcgggcaggggttaggggagtggaaggtggcatcagtttgcaaccagttacccaaaactgagaacaaaaataggaattaccataattccagatgatttcaaaggagcttgtttaatcattctctcctaacttcaaaatggcattatttaatacacttatgtttttaatactaacgttaggctaaaaccgggatttaatttctcttccaggaaactctgttgaaaaatatattttattgaaacatattgctggtttttctgtgagcaattatcaatatcttaattataataataattaattggatcagatcagtataaaaagctttgaaatgaaagcatgacaagtcgtttgagaaaataaatatactattgatgaaaatgtcataacagaatggcctgttctatagtaagacatattatgctaaaatatgactacaaatttatttttaaaattaagataatttgacatcttaatttatcttatgatatcttgtttgacatcttatcacttttcagcttaaacacattttaaatatgattggtgtgtacttttggttatgtaatcatggttagcagactctatgattaaaataaatattgggcatggttgccaaaataaaaaatacttttttaaaaatgaaataattgtgttaaggcattcttttggattgaaggtaggtggatttctaatgaaaggaggaaattaaagggcatacaacttttgaattagaggatgggaagtaagtggtttagcctcaaaactgctctttataatttctaagtgtttggaaatgttatctcttaaagccagaactatttcaaacaaaagctcagtcacaatgtcataatgaggaaactgtttcctaagtattagctgtactctttctgctgtcaataatttgaatatcaccagtgaccacggctgaaaataccggcagctataaattgttttatcaaatcactttttgaaattataagggggttgtaaacataagtccaagccccatgtgcttaagtatagttaagattttaaaaatatgtatcttttttgttttttaagacacaagctcttgctctcttgcccaggctgggatgcagtggtgcaatcatagctcactgcagtctttaaactcctgggctcaagtgaaccttctgcctcagcctcctgagtagctaggaccacaggtgtgtgccaccaggctcggctaattttttaaaacagttttttttttttagaaatggagtctcactatgttgcccaggttcatcttgaactatatcctcaagtgatcctcctctggtggcctcacaaagcactaggtttataagagtgagtcacagagcttggccccctagaatatatatcttatgcattaatatgaaaaggaataattgagagataagactctaatctgaaatctctgaaactctgtaagcctatttaaatacattctactaaaaaagtagccataacacaggaaggaaattcatatatggcagcagaatgattccaagcgaaatgttagttacgtattcattggtctaagtgtttatttatatataggcaattacaaaatagtaggtttgggaagaaccaaggaagattcattgatttataatgcctagagacagcatcagctggcttcgatgtcatcctagtgtttttcatttggtttctttgttgttttatttgttgtgctgttgggtatatggaggtgatagatccaactctgtaccgctgtgaaatcaagaaacttactattcagtttgtgtttgagtaaataggtgccctattgaaacaacaacaaaaacaaacacagtagcacagataaagaattactgaacaaaggcaccgacaattgtacctcataaaatttgagatgaggaaagattatcagaaaattcgattggccacgtagcctcacataatggccaatagtaatggatgatttgttaattatttgtaagatttggtctactcagtatctgttggaatcccagtagtgatagacatcagtagtgtaactaacactgattaatcagtgaagctgtgcatatcaatgttgtgttttgacagtattgtttctttctttctctagagcagtgtttctccactgggggtgattttgctcccaggagacatttgtcagctctggagacatttttgattgtcctgaatgaatgtgaggggtctgctgtgggaatctagtgagtagaggtcagaaatgtgcatcctacacttaacgcaaccagaaatgtcaggagtgtagagtttgagaaaccctgttctagacagagatacaagagaaaccctgtgataattagaaggtaattttctgaggtgggatcaaagtaatgacttttaaattgataattttaagggagatattaaactgtggcttccaggttcattagtttcaggtacttttcttcttttgaataaccctgcaaagaagaccagcatgcatgagtaggatcatttggccttggcttcctctcttgtgtgtattgctgagtataaaataaaagtgtgacccagttttcttacaatttttggatgatacttctgattgggacttttttgttcagataagttagtatcacttatttggctattgccaacttttttttttttttttttttactaggaagcagttgttcctttttaagatagaggataaaaactgatggctactggggactccagtcagcataattgctttcattggtgcattgtgcttatgaataattgaatttcatcatcttttgcttgggcatgtccttcccctcgctatagcagttaccatttcctgttgctagataccttcatatttatcttatttttatcattcactatgaaaatatttagatacttattatatccacaatatttatttaaaaatgattatttatgtttgtttacattatttaggtaatatttggaatatttccaattcagtcatcaaaataggatgtaacattgatgtacattcagggaaacaaatggaataatacatgtttcagcaaagattggacacctttctatatttagttagggaaggaaacattgaatctaccatagacatttaggctcttcaaaattttctgtaagttagatatatgtgaaagtgaattccagcatagctttaaaagtagtggtcattaaaacagggaaattagaaagaaaatttctgatccttaccctggaagtctactcaggcactattttaattaaaagtgtgagaggaaatagtcttgttgcttctatgtgtttgcaagtgtgacaggattaccctgcagtttcaaacagttattcatacagttccccataggtttaaagggctaaaattgactactacattattattttttaccctcaattaccattatgaaggatctagaaattagattctactaactaatttattcatgaggacaaagtatctcagatggtaggaccattttattgtcaataatcatagtgttactaataaatccacattcatagccatttattatgcatattgttaaatgagtaagtcatccttataaacaaagttatctaagtaatatataaataaaattatctgagtaatataaaaataatattaaaaataatataactaaattgtttccttcagataggaatacaattatgacaaaaattaattagatgacacttgtttaattatatgaactagagcttggttcaatcttgtctgacagagcctattagatatatgtgataaaaggattacaattccagtgttgatttttttagaagattcttatttagtctctttggagctggaggtgtcagacaggatgctggaaaccaacaggcagctagatttataacaactgtttgcgattgttttggaatttggcttcctgagaggtcagctctctgacgtgtatccagaatcagtcagtccatcttgagcaagtcgaggctctagtttaaacatttgatggatatttctgcccttcattttcttgctgaataattttatatattgctgtctcccagtcatagaaagccaattagaaatttttaaaaatactggccaaaggatacaaagtgtcagacagaaggaataataagctttagagaaacacaacagggcaaccagagttaagaataatgtattgtgtatttcaaaattactgagagtaaatttcaaatgtcttactacaaaaagatgggtatgggagctgatgaatatgttaattagcttgctttaatcattccacattgtgtattcttccatatatatcagaacatcacattttaccccataaatatatacaattatagtttataaactaaaattattaatacaaataaaataataaaacactcagtgttttattactttatgatggaacttaagcaaacaaaatacattttcgagaaacttttcaagctttggaagttgatgatataaaaataatttttcccttcttttgatctttcagaatacttcagtctacacagctttgatgatgtagaactatgcgttgccaaaacttctgcagcccttccacacttcacattacataatacagatattttaatagtatattggaaatatattaaattagtattttagtttgcttgtgaaacatgcgtgagcattcaaggaagttcaatttttggtaaacattaaatgataatgacagctcattatagagctagaaagcattttccctgtctcctacttcagttgaaatttaaaaaagtaaaaaatcaactgagacccagagaaataaagagacttgctcaataaatctagtgtagtcttgagactaaggaaaacatttcttgactcctaatccattgttgtttttaatattactagctgataattccattcaaaataccttttaaagaaatgtgaaaataaataatgatcctttagttttttatatatataaaaatctatgtttatttgtggaatttttacttaaaccttttaggaaagatgcttgaattaaatatatgtatgtttgtatgtatttattcatatgttcacataatacagatagaatagatatctatgtatagatctatctatgcagatattgatctatctatatctatcaatcaatcaaccagtctatccattttactaccagataatcagtaaggaaacattatatagtgagtggaaaagaggaaaactgtgagtgtggtttacatagctttgtttgccttaacttgtctgaagtcatcatatttgtttttaacatattttaaatattgtgatgactataacctgtgtcatcattctttccatccaaatgttttcaattattgttgaaatattgcctcgtgaacaaaggataacaaccttggctgcattacacacacacgcacgcgcacacacacacacacacacacagacacacacaccccaccaagcaagcagcacctattattatgaactactactctacttctcttctttcccctgatatatctggctgaaataatctagtttatatttgaatttcttctgtgtcttaaaaacttgtagagatttttctacttctccatctttatgatgtttctgcatcattgttgaaatgactcattatgccttattactttattaatttatttgccaagtgttgtttggatccctgttgtgtgtcagataatattccagattctggggatacaatggagagcaagacaagtttgtcagactgacaataaatgagtaattcattgaaaatacaagaaaatgtcagctagtaaatttaaatccttgttgaaaaataacatagggtgaggtctagagaatgattagttgcttaggaaaggctcactacggagataacatttcaaggtcaaattgaagagttgtgtaggttgcaaggccagtaattacaaacaacatagggttcaaactatatagatctattccaagaacagaaaatatgtaagtggtggacatgggtagagaatggtacaagatgaactcaatgagataactaggggaaagatttatactgagttttgtaggtcaaggttttattttgtgagcagtaggtacactctgaagaaagaaagtggcaatacctaagtcatattttaaaagtacactctgtcaattatatggagagcattttctagggatattaaagtagaaactgagagaccattctgaaggctattgcagtggtacaagtaggagaagatgcagggtgtgaactatgtacagggatgctattggagaaggtaaaaagtaggtgggtggaggatttgcttggagataaaatgggtagggctttgttggttaattaccttcaacttgttggaaatagaggaatcagcatcatctctgaggttttaaatgtcattaaatgggtaattctattttgaatattttgccacaatttttgacaatggaatctatttcatggttaggtcttatatgtacatgtttatgcatgttttctgtgtataacagtataacagaggaatttttagaagcctggttgaaaaaatcttgaaataaaattaacaaatttataataaatagaacatagacatgcaatccattgtctcttggggcttaaaatatattatattgcctatgattatttgattcaatgactccataatattttatatgctttttctgtcccaactacaactacagctgaagatacaatagaaaataggagagaaaataggagagctcctgccataaggaaaacaggagagctcctgccgtaaggatctcattatgtattaagggagatatgcactaatcaaataattagatatataaacatttacaatttatgacatagaataactgcaaagtataggaatataagaatgaaagttaaatattgcttttacttttattgcttaatatccatgtcagaatttctaatgcattggctgtatctgttttaaataagtcacggaaagctttcctaaagaaatgaagatgagccgggctcaatggctcacgcctgtaatcccagcactttgggagcctgaggcaggtggatcacaaggtcaagagattaagaccatcctggccaacatggcgaaaccccatctctactaaaaatacaaaaattagctgagtgtggtggcatgtgcttctagtcccagctactcaggaggctgaggcaggagaattgcttgaacttgggaggcggaggttgcagtgagctgagatagcgccactgcactacagcctggcaacagagcgagacttcatctctaagtaaataaataaataagaaatgaagatgactgcagataagttgactaagcaagaatatggcttgagcatagtgggacaggcatgaggcatggagtattagaaacaaagaatgccatggtagtgggagcagcacaaggaagggggaaacaggttggagaattaagtagtggccagatcatgcgggtcatggtgctaaattttcaaaaatgatcagatttgcttttggaaacaaatatattcccgttgaagtgagaaagtaagttaaaattgaaagttgtggctcaagaaaggacaaataaagacactagtggatggcctaggcttgagattataagcaaatggacttaggcagtgccagcagagaagagaaagatttggacgataataataagtaaaataaaaagaaagtaacaaaataagaatgtagtggttggtgatggcggttagaatgatgtatcagggataattcttgagattttggttgtatgacttaaatgaaaggggagttaaccattgagatggggaattctgggtgagaaccaggtttgagcgtatggttggatgaaaatatctgttaaacggcatttagtaactaagtggggaaatctatcaaacagtatttagggtgtcacatttcttgattcaaatgtgaaaaatgaacctttaagttaaaaatagtctccactcctaggtggaggttacagtgagctgagattgcgccactgcactccagcctggacgacagagcaagactctgtctcaaaaacaaaataaaacaaaagaacacaaaacaaaacaaaacaaaacaaaggtagtctccacttcttaaaaagaaggagcagagttgtggatcatatggtaattctgtattagcagtttgaggaacttctaaggtggttgcatggatttgccttcctagcaatggtataagaggggcttgattaattcacatctctacaaaacaggttcttacctatttgattttagccattttagtgggtgtgaagtaatatcttgccatggcatttatttgtattcccttaatttattgatgatattgaggatcttttcttgtgcttattgatcatttgtatatctttgttggagaaatgtctgttcaaattctttgcccattttttattgagctcttttcaattgctgaattgtaagattttttcatatattataaatcaaattccttgtcagatacataagtttcaaatgttttctcccaggtatgttgtctttcactttctgattggtgtcttttgatgcaccagatttaaatgttgataaagtcaaatctattttttctttagttttctatacattgttaatttagactaacttctttttgtgtgtttgagaacataatagatttttatttctatgtttagttctatgatacattttgagtggattttttaatatgatgtgaggaaagaggtccacatttattcttttgcatgtggaaatacaattatccatgtaacatttttgaaaagatttttttttctgttgaataattttggcacccttctcaaatgtcagctgaccacaaatatatgattttgtcttgggactctgtattctattaatctatatgtttatccttaggccagaagttcagtcttgactgttgtagctatgtggtgagacttgtaatcaagatgtgtgagcccttgaactttgctctttttcaaaattggatttctgtgtcccttacatttccatatgaattttaagatcaactcgtaaaatttgcaaacaaagtcaaaagaagctaagacttttgatggtgattatattgcttatgtagatcaatttgaaaaatagtgctacactaacaaggttctgatctgtagacatacaatgtcttttaatttatttagatattattcagtttcttaaaagaatgtgttatatttttccatctaaaaatcatacttttattgttgaatttgttactaggtattttattgcttttgtggccattataaatagaattgtttactccatttcatctttaaattgtttgcagctagtgtatagaaatgtaatgatttttgtgtgttgaatgcttatcctgccacattgctgtatttgtttagtagtccaggctctttatactcataaggggttatcagtctgtagctttttccaactatgtctttgtctggttttgatatcaagataatactagcctaatagaataagtagcaaattgtttcttccttttattttttggaaaagtttatgaaggattttttttaatgtttcatggaactcactgatgataccattatggcctaggcttctttttcacaggaagttttaaatttatttcatcaatccttttacatgttataagcctattccaaatatatattacttctgaaatttatgtctttctaagacttcttgttttgatctaaataactgaatttgttgataagcaattttatagtattctgttacatgttcatttctgtaaggttgatactgatgcctcttctttcatgcctgattttagtaatttgaatcttgttattttttctcatccatctatctagaggcttgccaattttatttttcttttcaaggaagaaactctcagccttattcattttctccattgtttttttagcctagatgtaacttatttccacctaagcttttttatttccttccttctgcttgcttgtgttagtttccttgtttttttcctgacttctttaggtagaagtttaagctattaatttgagatatgtattttcttcttgcccttttttcttctttcttcttcttcttcttcttcttcttcttcttttttttttttttgacacagggtctcactctgttacctagtctggagtgtagtggtacaatcatatctcactgcagcctcaacctcccaggctcaagtgatcctcccacctcagcctcctgagtatctgcactacagatgtgtgccaccattcccagctaatttttttaaaaaaagttttgtcacactgtggtctcactatgtttcctaggctgatcttgaccttctgggctcaagtgatcctcctgtcttggtctgccaaagtgttgggattacaggtgtgagccaccacacaagacttcctccctcccttccccactccctcccctctttccttccttcctgtctccctccctttcttttcttctcttctatttttctttctttttgacaaagtctcactctgttgcccaggctggagtgcagtgttgtgatcatggctcactgtagccccaatctcccaggcttaagcaaccttcccacctgagcctcctgagaagctgggacttcaggcatgagccaccatgtctagctaaatttttaattttttgttagattgtgtcatactattttgcccaggctggttgtgaacaacttaccccaagcaatcctcccacctaggcctcccaaagggaggattacagacatgagccaccgcacatggcctaagattacagatatgagccactgcacctggcctctggctttttctttctttcttcctttcttttcttttcttctttctttttttcctctttactttctcactctatttcgttcctaatatagatttttacagctaataatttccctgtaagttcttctttactatatatcataaatttttgtattttgtgttttcattttcattcttctcaaagcattttattatttctgttgttatttatttcttgattcattggttatttaggtaactgttgtttagtatctatatatttgtgaatttcccaaattgccttccattattgatttttaatataatttcatttgggtcaaataacatactttttataatttcaatacttttccattcattgaaacatgttttgtggcctaacatatgatctcacttagaaaatatttcatgcaaacctcataagtatgtgtgtattttctgctagcatttctgtctgtaagatctttttgctttagaatgttgtttgtcttctattttattactgatgttctgcctactggttctatccattgctgaaatcaaggttttgaagtctccaactatttattattaaattgtttattttccctttcaattctataaatttttgcttcatatatttgtgagctctattattatgtgcatacatatttataattgttttatttttctgatagaatggcccttttattattgcataatttttatctttgtctctagtaagaatttttgccttagagtgtatttcatttgatgttagtgaaaccattctatccttgttttgtttaccagtttcatggtatacctttttcacctttttattttaaacttattagtgtcttcaatttagaatatatcctttgtatacagcatataattattttaaaaaaatttatcctgtcaacctacacattttgattcatgtgtttattttcatttaatgcaattattaataaggtagaacatatattggccatttatttaataatatttgttttctacatatcatatgtcatttttgtttctccattcttggatttctcactccttttttgttagatattttctgctgtatcttttatatttgctattgttcctttttactattttttgtgttatttatttagccattgccttgtaatttacaactagcatcttaatttagaaaaaatttgttcagataaaatactaatttaatttcaatggcatacaaacattattccaacttcatttcatgtttttcacccctttgtactgtaattttcatacaagttatatctttatatgttataacccaatcaacacgcttttataataattgtttttatgcagctatgttctaaaacaagtaggataagaaaggagttacaagcaaatgtgtttatgttttctttcataataactgtgtggatacttttactaggtcattttgtgtcttcatgtggtttcaagtgactatttattgtcatttcatttcagcctgaaggacttcttcctttagtgtttccttagagcggggctaaaagtaacaaatgctctcaggttttgtttatttagaaatgacaacttctccttcctttatgagagaaagtttagctcgatatagaattctttgttgacaagctttttcttttaatactttgaagacgtcaacctaaatctcttctgacctctgtggtttcttatgaaaagtcagctgttattataattgagggttccttgtatgtgatgttatgtttttagtgctgttttcattaatttctctttgtctaagttttgtcaacttgactatgatctatctatgtgtggatctttttgagcagaatttttttgagtagaaacttggaattttttgaacttcttaagtatatatattatgttttatcaaatcgagaaggttggagtcattattttttaaaacttgtttctacatatttctccttttcttctctatagtctttatggttttccttctttttaaatattggatatgtctcactctatacattatttatatgtgtctcttaaaatagtaactttaaattataattttaataaaacatggtctaataatctaaatattactctcagggttttccagtgacattttttaaaacaagataatgaaaacatatattgtaaaatataaatatttacactatctgatatgaagttcattagatacatgtggctacttaatttttaattaattaaaatcatgtaaaatttaaaattccatctttcagtcacactatccacattacaagttttcaatagctaaatgaaaccaacagctactacattgtacagcgtagagataaaacattttcatcatcacagaaatttctgttagatagaactgttgcagatgtatatatcataaaaaattcccccttcataactcagtacccatttttgaatgaagccatgtaaatatttgtatctgtcaaaaatcttctacagaaatatgtttgtatatatcttcatggatctatacataaacaatataatattctataatatatacatttatatgtgtgtgtatgtgtatatgtaagtgtatacgtctacattatatttaatttcaacagtacatatggtctatactttttatccacttaatgtatcttgaagagctttttatatgaacttttttaaaacaaaaaaaattgtgtaatagcaccataaagtgttcttgtatgatgtattaccactggtttaaatatttttctattacattactgctccaaaacaaacataaacaaacagcaaagcaggcatatttcaaatatatatgtaggctaaatatattccagtgtattggtgagtcaaagaaagtttatattgcaatttattagataatatcaaatttcattaatcaaacccaccaatagtgtatgatactctctgttagtccactcttcctgttgttgggtattgttcaaccttttagttattttcaatttggctgataaaagatagaatttaatccttatgttgatttacaatgatttaattatgagagaggttgagaatcatctttttatatgtgcattggccattgttgttttctggtgtttgaattcctgtgcataagtctttcatattgggactttgcaaatgacactcatggcaggaacattttaaaaaaatatttgtacttagtcttaatctaactggaattattcattcattaatatctgtaaagtccactgaaaggatgttctgtgtttcacatatcttaataaacctttatctgttgaaactggcctgaaagaagaaatgaatgaatgtaaaggaagagagaacaatgggaacagttgtgagtaaatgtctataattaactcattcagttataaacacctgtttaataaaattggaggaatcatctaccctataagagttggaaatattacccttaaattttccttcagtttttaaaatgaaataaaatgaataatgaaaaaataaacacacacactgaacaccttcttccagccttaggattaattcagcctctatttggacattgaaaaacatgcataaaactgatttatcttagcattctacacacttcacaaaaaaattgaagctattggtgaacatttctgagaaagtggacaatacaagaaaaggcttttggatttgggccataaaaatgcaagtttagtgcatgacaactcaactagtgaatgtctgcctcagctcctaagcacagttgaggagatcagcagtgtttgcagatgttcttgggagacagtaaaatagaacccggttcttacttcagagcttgagattttgctcaagacattgaatctggaggcagctcttgattgtttcttattgtcattgtcactaaattggacttgattttataggccttctttctttccccaactaagcagaaagtgccaccagggatgtaaatctaaaattattcttttcctttatttttgttatttgctttggcatggaagggtcatttatgatatctctgcttatcaaaaggatactgacaaataaacaggaaacagcaaatcaatctattaggagtcccgaacaggaggtataatgttacatcggttaatatattcaagaaatattgatattctaagctgaaaacctgagccttgttattctttgtttttttttttttttccaagtgaattacacattcagaatcttcttaatggtcagatccttatattttttgttgcttgcatcctgtatctgttataatttcatgttaaaattagaggatggagatattttagcataccaatatgctaagttgtaaattatgaagacataatgaaaactcttagttaacttagagaatgttaatgtaattaatatgtaaaaactcttccaaatcaattgaaaatgaacaaaaaatataaatggactttttatcaaaaaatattgttgataaatttaaaagctgcttaacataattcacaaacaggaatatttatcaacaagaagatagtatttttcacatatcctattggcaaagattaaccctgatgttaccatgtattggaaagactgtggaataatagagcctcttactccttgatagcaggaatgtcatttgtgtttttactttgggtaaaattttgtcattattgtgtgaagtataactttcacatgccctgtaatctaaaaattccttcctaggtatataccataaggaagcaattgcacgtgtatttcaggaaacaggaacagggaggtttattcagtcatagttgcaaacaaccactggtctcctcaactgtgcttaggagctattaatggatatttctgataaaatgacctgtagaatgcatggctttcaaccttggagaattaaagtgcaagtttagtaaatgaaaacccaacttttaaattaattcactatgtaaattatttatatccttgggtttctggttaatgtctaactcagtttgctttgatacatatatatatgtttgcctatatgatgtataatttaatcttagttggtcttgaacttttgaaagaggcatcaggtagtccatgatcatcttatacttccctttatcactcagcattttgttactgattcatgcatatttgcatttaacctgtagtccagttattttataactacaagatattctatttatgtcattctcttggttatatgatatgccattctttacatatattaccatatatttattgtttatcttacatttaaatttaattgggaattaaatttgtaattgctaaatctatcacgattgacaatacgtgaagagacaaaagctgcaattaatccaattcaagagagaaaatgataaggatagagtagatatctgtcttatctattaattcatatttgtcttatctgctaaatagatatctgtcttatctactagttcattttgtattgctgtaaaggaatatctgaggctgggtaatttacgtaaaagatgtttatttggctagtgattctgtagactgtgcgaaaagcatggccctggcatctgcttctggtgagggcttcaagttgctttattcatagtggaaggtaaagggcagcctgcatgtgcagagataacatggtgagaaaggaagcaagaaaaagagagaggacgtgccaggctctttttaacaaccagctctcatgagaactaatagagtaagaactcagtatgataaaaatggcaccaagccattcatgaggaagcctgtcccatgacctaaacacctatcattagagccccacctccaacactggggatcaaatttcgatatgaggtttgaaggagtcaaacatcgaaactgtagcaatatcaaatatggtatcactgaggaatatatatgaatatatcaaatctggcacaattaaatatcttttttatttgttaacctatgttttctcctattttttggaattattaattataatgctaaattaatgatgttatataaatctaaaatgagcctttgaaccatcagctgtcaagaagatttagtctttgaagcactactatttttctgtttctatttcataaaaagaaaattcagccatggtaaaaaaagtttttttacttaatattggacattatagtttcccttctttttgtaaatatgggaattgcaaagcttttggtaaccattatttttcttacactagaaataaaatcatattactaattgaaatacttaaaatatgcgtgttttaaaataataattatattatttttgtttatgaaattatactctgtaaaatgtgcctgatgggctatcagaacaagaatgaaattaagtaactttctactgggcagctccggtctactcatcttgtaagtattatgttacacacattgtataaggccatggtgaggaaaactcataccgaaattctaatgtcaaattttttaggacttccatagcttttatatgctgtattctttaatgcagctgtgcttgaaggtcacagcaccatttaaaaatatatatatacttgatataggatgattataaagcactaagacaatttgaagaatcattagaccagcacaaactgaacttcacataaataatttgcataaatatggaagttacaatatttcttttcttctttcatcagcccataacttttccaatttattaaagtgttgggtagagaaatattggcatgactctcaaattcaccttttctgccctatttttttaagttattaatagatttcagtgatcattaatttccactttctgcgaaaaataaaaattgctttttaaatgttttagtgtatggcctatgatgtaaatgaatagaatattattttggctgtttacatttattgagcaataaaaatatatgtgtgtcagtctatatggattagtaggtattgattcaatactcataaaaattacgtagttgtatcatggcattttctgcattgggttgttttattaaatactccaatatcaaaatgcatggtaacaagaaaatatatatatagagagagcatctattatgtttacaaaatatagatattgcagatgtcaggaaagagatataatttaagcatgatcataattaattagtcagctaagaaaagagaacatgaaaaaatacacagtaaaaaaaattgattttaaaattttctgcatatatagccagctatagctacagagaacaatcaagcctttgtttacagctaaattataaaagctatttgcttcttttctgttcttaaatccagacagtgaaagagagtgtgtcttttgcatcattctagggactgctgcctcctttcccagcttctcttgatttcccttttcttcttttcaactagatcgtaatctttttccctcttctcctccacttatggtccactggctttctaaaatccttcctcatgctcaaaccagggaatttggtcatttatggactgcactatgaaagaagcattttcataatatatacttaattacatgtttcaaaattaacatctttccaaaatgatagatggcttttctaaatatttttgtcaggtatcaaaaaactaataatgagattgagtagtgagggaagttataccctaaataaattaaacataaaggatggccgggcgtcatggctcacgcctgcaatcccagcactttgggaggccaaggcaggtggatcatgaggtcaggagtttgagaccagtctggccaacatagtgaaaccccgtctctactaaaaatacaaaaaattagccgggcgtggtggcgggcacctgtagtcccagctactcgggaggctgaggcaggagaactgcatgaacctgggaggcacaggttgcagtgagccaagatagcgccattgcactccagcccgggtgacagtgcgagactccatcaaaaaacaaaacaaaacaaaacataaaggatatgtgtgtgaatatttagggagtttgatgggctggaggttgagggagcagggaaaatatcataggatccaagaagacttacatttttgtctccatcattcactatctgttaaaaatgtacccatctatactttcagaattattcagccaaagctcctggagcatgattttttttttaattttgtaaatagagatgtctttagatatttttattaccagcttattccaaggtctagaacaatacacatccctactacacagttcctaaggttctgccgtttctcaatgttaaggcaaccaagtcctttataccaacttgtattaattgtaactgcatctctcattctgccttcactcagtcttttctcagtctcaagtcatgcaaatgaatattttatgttttctgacacttctgacatttaagtttgtgtttaatgatttcttgctatgatctttaatatctgacatcttggaataccatcattatctcattttctacctctagttataatgtttctgacaaaagtgaatcattgtaatggggcctcttaatagggacattaccgtggcaataaaagatgtaaattgcagttccaaacaacctagaagtgcaatcacgaaacagtgatcaatggttagatgaactgcacgtgtaattaaatacatgtgaggtcagatgaatcacttgagctaagaaggacagggaaggcttaaaggagaagaattagaatgatccttcagagaaacacaatttgagtaaggaaaagggaaaggtgaaggtggtatagcaagtagagaaagttgaacaaaggtacaagaaaaagaaaacatgcacatttaaagaatacaagcaatggtacaccatgttcataactgcatgattactggcccacccggtagagcatgtcatttggggaacttgttccttttctttagagggcatggatttacgtggaacataaactttcatctattactctgtataaatgataaaagatgaggctttctggcatctctcttaaactccaggctttttatccacaaatcctgcacatttcctattggctatccttcaggagcgataacaataatgtatataaaattcgaatgtctaaaactttcctcaaaatatgcctgtttttctttattttctccagtgagaatgttacaaaagcaacattcacccaatgataaaaacttgaaaacctggagttattctgtatactttcttctttctccatcttcaaatctaatccttatttttttttttttgtattttattcacaatctcccctgtacatgtccctttcactctttgcctctgcttcttccttaactttgtaacattgctttcttggattgtcatgagcctcttaccatctctcatgaactcgagatgtcatcaaatctaactagtttttcacccagttgccaaggtaatagttctaaattcaaacctgattttgcttctttcttggctttcagttttaccacttatgaaaacagtaataagcactggcatattcatgttgacaataatgcatacttcatacataatagcagtaatctatggaatcatccctcatcttcccaagaattgtttttaagctacttgtgcattttttgaagtttattctcatattgtaggttgtaattcaaaactggcaagcttgtaggctccagacagaatctggcccccaagtatatttaggattgaatcataattttaaaattatgaaattataagttaaattttgctttctaacttttttgaaaaaaatggaaaactagcaatactgtgtatttttctataggacattgtatctggagctgaggagctactgtgctcttttaaataggcggtctgattactccgcctctctgtgattcttacacagacagcttcagtcttaccctgcttacccagtggtttcaagcaaccatgttttggacccttgctctaccagtgactaacgaggttcatgacatgcatcttatcctgaacaatatggaaagggaaacatcctagtgggtttggtttcccaactttgtagcaccttcagtgtctgcctgggggcttgttgtacagtgaatgttcaacacataagattcgcttgaatggaatgatacgtacaaaacaggcaccaccaaatgttcccaagctgccggaaaacatacatttgtttctctacttgatcacataccttgtctttcttgcttaattcatctagttaatcacctgcatatttgctttactctgtttatcatatcttgcttgccttcaacagaatgtacatagatggcaggattcatgcatttttatgccctttgtactattttggatgtcgaaaactggacaggcaggcatcattgctgagtaatggcaatgaacacatgtggaaattacttttgcatcctttcatttcaatagtaattaagttgttaaatatgaaggtactgtaatagcattattggcaataatcaacttccccaaaccacaatttgaagtcatattaagttgaaattaaaccagaactatttaatgtctacaattagaatcagtgttgaccaagatgtctcctgtggctgaaagaaagaataccccaaatgcaataaataataacattaaaggcatacactaagagggattgacctaagatttccaacatcttctggcgtgttgactaagctgccgagatacgtttcttattcgtgtatcatcagtaagtttctctgcagcatcagtgacctgcccacgactctttaatttcagagaagattcagcagcttgggccccggaaaagatatttggaaaatttcccagtttgtgtgctgcataagcttgaggcagtagagggataattaataaagtgccagactgggtaattgtaggaactgtaaaagatactaagacgttgttaccggaggcacagacgcacctgtgaaagcgtgaagttaatttgtgtgaggaacatcacatgagggtggatgaggatgagggaggtgagatttccttcaaattaattcagactttagtcagagaagctctcaaaaaaaaaaaaaaaaaaaaaaaaccctcctgctagtgagataatgtaaggcttatgaaaagaggccctcctggattgtcttgttacgtatgcttctctctgaccttgagaaaggtgtaacaactgcaacgttggaattttctaatccctgtaggacaagaatgatgacattgccctatcagtctttacataacagcgtaccatttcatactgtccccttgaacatttccttaaaaacaatacacctcctgatactataatgttggatactttgtgtatccagtgtcaccccaaattccccataggttaatttctatcaaatttcaatatacaataaagtaatgagagagagaattaggtcgtatcatagtattgccctgaagactgtttaaaatcattgataactgcaaagttcctaacaacttgcagaccacatgatagatgactgatcagtggtagctgctaatgttgttattttcatggttatttaaatggatcttttaaaaactaaaaaacaaaattcttgacatgaattgttgccagtgaatgttgttatcttcttctaaaatgccttatatgtagattgtacaagataggtgtaaacccccataccttagcattgccatatggtgatgtctcgctgaccattccattctcttgcatatctggctcaggaattaataacctatgtcattccaaaaatgattctctgataccaattgagtgctctacaattcaattcaatacggagactaattaccaggaattagcgtacacccacagttaaggagctcaattcccctggtctgtcctcacctcagatgccagctgccagtccctggtcccaatggtactgaattatgtccaacctggctacaaatgtgagggttctcattaccccttttcaggctggagaatttcttagaatgactcaaagagctcggacaagagctattcttatgagtagcagtttattgtagagggtacaaatgaacagctagatgaagagatatatggggtgatgtctgaaggggtccccagcacaggaggctctttctctttggactggggtacatcaccctcccaatgcatccatatgtttaccaaccagatggttccctcaacccttatcattcagagtttctaagcaaggtttcatcacttaggcatgatttattcaatcactggccagttgctgaactctgatctccagctcttctctcctaccagatcttagagtggggctgaaatttctaaacttgtaatcgcatgattgatgtgatctgatgaccagcttaatcctgaaactataagctaacgcctcccctcacaaagagtcctctgatgttgcagtcgcattagcatgaaatcgaataaagtgcaaagaagtttgctatgaataacaaaagacatttctatcatttaggaaatttcaagggtttttggagctctgtgccaagaaccagagaaaagaccaaatatatattttattataccacccaaacttgccaaatattgattagtctgaatttcttatcctatccattgtgttttggggtccctatgtaaaacaaacaaacaaacaaacaaaaacaaaacaaagaaactctgactttacacttttctggactttatagagagcagtcttatggaaactataaggtgtgcacaattgtttatgcacgtatttctctgcaaataccatgcaaagtatctattatgcttaaaattttatactatttattttgtgtttttttgtttctattttggagttttttcacacatcaactcaatgtgcttgccctctctttagacgtgaattagacaaatatctctatttcaagtgaaatcttttttctaccttgaatgtatttgtttcattgtgtagtttaaattccttctgtcctcaaatttgttcaattattagattataggctcaaaattagtcaagtacagtgtagtagtttttgtttgacatcaaatgcaatgttctgtatttgtgttttaatctgtttcaccctggggatttcctttaaagagagtctgtctttaatgttagtatctttttaaatataaacattcaaccagtaagaatacaaaaacacagagacagaaaattatgacaaacagaatgtcaatacttcttttccttttgattaatctagcatgcaaattataaaagcattttggttactcaggaatttcaataggcctttgaactttttaaataataaaaatattaacatattctttaagagataacatatagaaagatatattagcaaacctgttcttactgaaatgtctaatatgtcctctttaagctttttatattcatctgaataatcatacatacatacatgcaaatatgtatacaatataaaagaaatgagaatgccattttatagtgctatgaaaattgatttttttttacatttatacatccaaattcatgttaagaagtttttaaatataactggtttttttttctttttctaggtaaccttcaaagcatcaagacattcagtttcaccagatttaaaatatgtccttctggcatatgatgtcaaacaggtaaaggagtgatcttctttgagaatacttttctttgtgatgcattggggtgacaatgcataattttactcagctataactcacctaagcaaaatctggcatgtctagtaactaccggaggacagtaatgactactttgcacaaaagatgtttgaagataatgtccaaacatcttccatatctgcacagcaaataattgggacagtttgcccagtgcctgtgctgatccaagtccatctcttggcagaggagaatgtggcagagtttagcaaatccaacaaatgcgggcttgtgaaagtttcaagataagccttaccatatacttgagtgtttcatgtgtgtacagattagagactttcctagtggctgtgcctagagcttcagatgtgtatattgggaaggcaactgctgaaaacattgattatggtcaagggattctttactggtatttgattgtcagcttggggttgtagaaaattttgcaaatggggcaagccaagcaattaattctgaacaaataaaatgttctaattgaaattagtgtttccttattccatgtgagccctaaagcacaattagagcaatatgtatggttgttgagtgttttgtacttaggtatcatttgcacgattaaaaagcaaagtaaatgttggaaagccaattcagcagattagtatctgtaaagaataaatgattggaaatcattcaaggacgtttatgagctttaagacgaacaataaaaatttatgaacttaaggcaggaagcctcatataatgctttgaaagccttttgaacacatggaatttcacagttcgaaagaactgctatttgatggctttagtcttttggaatatacatgtgctatatttttaaggttatattttttgacttaagtaatttatgctgtaaaagacagagggattttagtcaaaggcctcttttcctagtatagatgttggcctgttgtcttatcttttgctttgagttatctttattcattgggattttgtaagtcatatgttatagtaagaaaaatacttgacatttatagactaaaatattatgctaaaaagtttctaacataacattatctgaaaaatctaagcttgaaaagtctgctatattaaactgatcatgaacttttaaaaaatcaggtttcaggagctattgtaatgaagactggaactggcagtaggacaaacacatagatcaatgaaagagaagagagaacccagaaatagaccctcacaactatgcctaatagattgttggcaaaggtgcacaagcaatttaatggaggacagtcttttcaacaactagtgccagaacaatcagatatccataggcaaaaaataaaaacaaaaagcccacaaaaaacaaaaacatcatattggcttaagccacacaccttatacaaactcagaatggatcatgcttttaaatgtaaagtataaatctataaaacttttagaaaaaaatgtttgggatttaaggctagggaaaaatttcttaaactgtataccaaaagcacagtccaaaggaggataaactattgttccatgatagaccctgttttcaggctaaaaatacaagttacagtctagaagaaaatatttgaaattcccatgtgtgacaaaggatcaacattcatatataaagaattcttaaaaatgaacggttaaaaacaacaactataacaaaaacacaactatacaatcagaaagtgggcccagacatgaagagacatttcactgaagatttacagatggcaataagtacatgaaaatattttaacattactagccaataggtaaatgcaaattgaaactacaatagaatatcactacgaatctatcagaatggttaattttttttaagtgaccacacccaatgatggcaagcatgcagagaaactggatcattcatacattgcagttggaatgtataatggtacagctactttggaagatattttgatagttttttaaaaaactaagcatatatttgggttggttccaagtctttgctattgtgagttatgccacaataaacatatgtgtgcatgtgtctttatagcagcattatttgtattcctttgggtatatacccagtaatgggatggctgggtcaaatgatatttctagttctggatccctgaggaattgccacactgtcttccacaatggttgaactagtttacagtccaacaatgatagactggattaagaaaatgttgtggggtgggggagtggggagggatagcattaggagatatacctaatgcaaatgacgagttaatgggtacagcacaccaacatggcacatatatacatatgtaacaaacctgcacattgtgcacatgtaccctagaacttaaagtataataaaaataaataaataaataaataaataaaaaccaaaaaaaagaaatctaattataccacataaataaaccaacatttatttaaacattaaaaaaaaaactaagcatatactaccatccgacccagcaattaaatttcactggacaattccttcaagtcatttatcccggatacataaaagtattcacacaaaaacctgtatgcaaatatttgcagcagccttatttataatagccaaaaactgagacagcccagatgttcttcaaaggatgaatggctagataaactgtggtccattcatcccatgtaataaatattcagcaatacaaaggaacaagctttcaatgtagacagaaacatggataaatcttcggaattatgccaagtgaaaaaaaaacagtcccaaatatgattgtttgtatgatttcatctatataacattctcaaaatggcaaaattaaagaaatgaagaagagattagtagtttccaggagaaaaggagggaaatgagagcagctttttttgttttatgggacaacaagagggatctttgtggagatagaaatgctctgtatcttaattatataaatgtcaatgtccttgttgttttcttgacctggttgtttacttgaccaggatttcttatagttttataagatagtatcggtggggaaaactgggtgaagaacacctgtgatctctcagtattatttattataatggcatgtaaaaataattatgtcaaaataaaagattttaacttgaaaaagctgtaattttttaaaaagtcctaaaataaggcaaattttttttttttccggtgggagggaggccgagagtttcactcttgttgcccaggctgtagtacaatgcacgatctctgctcactgcaacctccacctcccaggttcaagtgattctcttgcctcagcctcctgagtagctgggattacaggcatgcaccaccacgcccagctagttttgtgtttttagtagagataaagtttcaccatgttggtcaggctggatttgaactcctgacctcaggggatccacccgcttcagccttgcaagtgtgagccaacatgcctggtggcaaaagtttttttttttttttaattcagtttcaatttattttattaagtgtatggattatgcaagatcattgaaatcttttaccccgaacaagttactggaaagaggtaaaaagatttaagtatgcatttccacatttatagttttatgcaaatctgatacagtttttaaagattagtgaatgaaaatagttaaaagtagtaaaaaatgatcaattattaaataaactagtgaaattagtttgagaacttttgtattcttgtccaagtcagttgatttctatctagaagaacaatttttactatttgttttcagggaagctggttaactgtctatgaaaagtaaaactgttttaggttatgccagatcatccctgatagtgtcacaataaccattctctaaacacagaaactgaaactgctttttcatcttatttttaaatagtaactttgtgtaatttaggtttatgtttttaaaatgtggaataaggaacataaaactaggttaactttgagtatttggacaaaatagggcacaaacttttaaaaatataattaacaatataaacataattatggaccagtcttcatattcttatggtcttttttttcttatcaaggaacaataaagatactttatgacaaaataactggaggtgaaagaatgctagcatttaaataaattttagaaactttatttcaccattttatatcatttcatttatttattcattttatttattaattatgtcccaggtgcaattgctgggctgtatattatagggtgtatttgtgggtatgctcacataaattgaattacctccttcaagaaatttataaccaggaagaggtgatatgacacaaacatttatatccacagcatacaacatcatgttatgtatcatatatatggtagtttcaaagaataaggaaaacttttactcagggtaatcatgttagagaagaatcatatgctgggctttgaagagcagacagctaaaaatgaatagaaaaacaggagtttgagaccagcctggccaacatggtgaaatgccatctccacaaaaaatacaaaaaatttagttgggtgtggtggcacacacctgcagtcccagctactttggaggctgaggaggagaatcacttgaacccaggaggcagagattttagtgagctgagattgactactgcactccagcctgagtgacagggcaagactctgtctcaaaaaaaaaattaaataaagaaatagataaataaataaataaggcaagcagtcattctcactcttggctatggcattagaatcatctggagagttttacaaattgtttatgctgaggccctctcctgcagaaactctgatttaattggcctgaggtatagccccagctttggagttttacaaactccccaggagataatgtgcagctagggttgaagaccattgaatttaagtgaactgatctcttccacccattgaagactttccagatttcagaaaagggaaacattagaaataaaaataaaaacagctaattatttaaactgcatgtattttgtgccaaagtctttacttgtacacgcttaatccttatatcttttattcttaacacacaacagtagttggtgttattcttcctttattggtgaaaatacagagactaacttacctaatatgattcaagattgaaagtttttttttttttttcctgaaacagtgggtctcaatgtacatgctcagcatagcagcatcagcatagcctgggaagttattaaaaatccaaattctgttgtcccattgagacagaaactctaggagtgggcccagcaatctgtggtttgacaagcgtaagtgattctgatgcattcaagactgagaaccagtgtttagggacctgattccttaaactgcaagagcgctacctaagaagagagctacgcagccagaatctcaccatatgcaggacaaagattaatagaaaatatcatttaagagcaatgatctaccctgtttttctttagtttttcacaattatttgttcctggatttaacgtccaactgttcatttctgaccttggatgttgctctagtaacaaatttacccttcaaggttaatgtttgatctgttttcattataggtggcatagtggggtgtgcatggaagttggaagaaaatatgtgtttaaattcaaattatccatattaaaatttgtattgaaatataacatacctataggagcttgcatatactatgaagatagcttgaacttctataaaccaaacacctgtatggtgccatcacccagataaagcagcaaaacattgctgttctccattctgttactacgagccacaagggagaacactgtctacatttgtaaagattaattctgcctgtttttgcactttaggtaaattcacacactatgtactgttttgtgtatctcttattttactcaataattagttcataaaatatatccgtagttttcaagtattgtataacagattgtacattcccactatgatataccattccattgcacatatcacaattgatccattctactgttgattagattgtaatacagatgtacatgagcaatgcattattgtatagattatttgtctgatcactctctatttcccatccattactctgcttcttctttgacacctatttcaaaaaaatattgtttaagagggcacaaacattttttgggtgcttagatagtgcatctgccgtggaagtgtgtttatcaatgtaaacctcccaaagtcccgcttcttggctgtttatatcatattttacagaggagacagacttagagatattaactaacttcctcaagggccccagttcacagttgcagagctgggagtgaattttttttcttagctccaaagtccctagcttttcgattactttgtcattttcagaaagttcttatttatctttacagattaactgtgtattttcctatttatttgaaatcatatcaactaattcctaattaattaattggaaggcaagtgaaacatactacaatatgtatttaataaacatattacaatatcaaacaatatatgattttcaatactcagtacttaatatacttctccagacatagtggttagacattttatttttgtatttgcatctttacaactgtttctcaaaatagtcaatgaaataatcattctggaatgccttttaatgccataaaattaaaaacatacttttaaagaagatgaaagcattccaaagtatggcaaatcatgatatgttaaaaccttgatgatcagaatatttgtggttaatatttgtcatctagtattttgatagtcaacatatcagactaaattattttttcagcattctgagtcatgtatataaatagttttaatttaaccaataaatctatgtaattttatatattatccatatatatttggaattattggtccattggaattatttaacaattgtatttttaagccatccttaaaaagtcaagagtcctttaccgcatttttttaaggacaaacatgaagtaaggagaaatcaatttttttaaaatttttaaacaaatttatagttttatagttttcttgtttggatttaaaatacaccatgtcaagtagactagttaactattttacactgtcaaccactttcttaatacatcttatgtttgttatcagaaactttaattaaatttactcttgtttcagcagaattagagctgtcctctatacataatgggacataaatctgcataagaattagctttttccgaatgcaagagtaacagttgaatgaatcctttaaatcgtgtctactagagggaacaaatcaaccgtagctgggctacatctgctatgttagtagtatctgtcctctaaattcgatgctctgcaaaagatcagcattgttattttctacagttagatgcattcatttcagtttaggtctctactattttatagctctgggtacagaattatttttctggtaagtatctattttaactaagaagtaatcctgtaaaatgcatcctgcatgcactactgctttaagaagtaactcttctctagtgaattatctaattaaagtctggaccttaatacttcagtgctttacaattacagatacatatttaagaattctgggggagtacataatctggttatagaattatctaggctgttaaaattcatacattcggggttcactaatatttcaaaaaatacaaactcaaagaaagcacagtctgggaaagttactgtgttcaaacatgtgggactctgagttcatcctgaaatcctcctgccttctagtgcccatagaatactcacctttcctcgtttgtagttgctgctgctgaactgccttcctatgtaaccttctccttactacacagagatattaaggcattaaaaataagttagtatcaattttggaatatttcttttgggttaaggcaaaaattgaaaagtccctaggaggtggacaaaaaggaaggaaagaagtaaacacaagaaatatttttggaagccagtatttacaacattttttggtgaaagttactaatgtatttatcaatttatcactaattaaacaacacacttttatttatttttttattttttatttttttttattattatacttcaagttttagggtacatgtgcacaatgtgcaggttagttacatacgtatacatgtgccatgctggtgtgctgcacccactaactcgtcatctagcattaggtatatctcccaatgctatccctccccactcccggcaccccacaacagtccctagagtgtgatgttccccttcctgtgtccatgtgatctcattgttcaattcccacctatgagtgagaatatgcggtgtttggttttttgttcttgcgatagtttactgagaatgatgatttccaatttcatccatgtccctacaaaggacatgaactcatcattttttatggctgcatagtattccatggtgtatatgtgccacattttcttaatccagtctatcattgttggacatttgggttggttccaagtctttgctattttgaataatgccgcaataaacatacgtgtgcatgtgtctttatagcagcatgattcatagtcctttgggtatatacccagtaatgggatggctggatcaaatggtatttctagttctagatccctgaggaatcgccacactgagttccacaatggttgaactagtttacagtcccaccaacagtgtaaaagtgttcctatttctccacatcctctccagcacctgttgtttcctgacttttttaatgattgccattctaactagtgtgagatggtatctcattgtggttttgatttgcatttctctgatggccagtgatggtgagcgttttttcatgtgttttttgactgcataaatgtcttcttttgagaagtgtctgttcatgtccttcgcccactttttgatggggttgtttgtttttttcttgtaaatttgtttgagttcattgtagattctggatattagccctttgtcagatgagtaggttgcgaaaattttctcccattttgtaggttgcctgttcactctgatggtagtttcttttgctgtgcagaagctctttactttaattagatcccatttgtcaattttgccttttgttgccattgcttttggtgttttagacatgaagtcctcgcccatgcctatgtcctgaatggtattgcctaggttttcttctagggtttttatggttttaggtctaacgtttaagtctttaatccatcttgaattgatttttgtataaggtgtaaggaagggatccagtttcagctttctacatatggctagccagttttcccagcaccatttattaaatagggaatcctttccccattgcttgtttttctcagatttctcaaagatcagatagttgcagatatgtggcgttatttctgagggctctgttctgttccattgatctatatctctgttttggtaccactaccatgctgttttggttactgtagccttgtagtatagtttgaagtcaggtagtgtgatgcctccagctttgttcttttggcttaggattgacttggtgatgcgggctcttttttggttccatatgaactttaaagtagttttttccaattctgtgaagaaaggccttggtagcttgatggggatggcattgaatctgtaaattaccttgggcagtatggccattttcacgatattgattcttcctacccatgagcatggaatgttcttccatttgtttgtatcctcttttatttccttgagcagcgatttgtagttctccttgaagaggtccttcacctcccttgtaagttggattcctaggtattttattctctttgaagcaattgtgaatgggagttcactcatgatttggttctctgtttgtctgttgttggtgtataagaatgcttgtgatttttgcacattgattttgtatcctgagactttgctgaagttgcttatcagcttaaggagattttgggctgagacaatggggttttctagatatacaacaacatacttttaaatagcatctttttattttgaaataatataactgtattatagagaatctgaaaatacacacacaaaaaaagaagatagaaataatgcctctatccacctccgttttttagagaaaaccactgttaatgtactggtttatctcatctaattcttatttattgttattagtatgtaatattttttccacttatagacaaaattataaaaatagtataacacagtttactatcatgaacattccactatgaacattgttccttgtcttaaatatttctcaaaaacattattttaatggctttacaatcttttcatgtggtgatatcataatttattcaactcaatatctttaatatttatagatagttgacagattagcactctcactattacaaaaatctgtcctgcaacgaacactaataaatatctgtctttgtttattctcagttaaattaatgagactgaaattatgggattatatattttttacattaattagtgttcttgatgcatattgctaaaatgcccactagaaagcaaagtaaatgtatgcttccccagtaaagagaaataatttaaggttccttttggtttatgatgctattttataggacacgaatgctttttctaaggtaaatgaacaaacataaacaacaaaattatttatggataggagaatctgtgatatgttagcaatttctgattccttcttacactgaaagctctgtgattcatattcactctctaagtgcaaatatctaagctcaagtcattgagaaagtaaacctattttaaaaaaaataaacaccttcaatatcaaataattgccttcattactctggtaaaattacactaggattaatagatgagtagaattagcaagcgatggagtaaaagtaagtttctcctcataggagttatttagtgagacttattttaaaactgttactacacaagacagtccttaattgtaaaacataatggagtcatcatttgtatctattcacaggtagtttatttctatagaaataatatcatgttctcattttaaactgcaagatgcaggttccaaccttcttctttagctttgcattcatttacaacatacaggtaaatttgaaacatgtttttagaattggtacctatatatacttgtattaagattatggactcttctttagttcagtgggttcctgcatgtgcctgttatttatttttactatcatgagataagtatctaagacaataaagcaacctatttccttatggtgtgttgactggcaaagaatccccttgcacatggggaggccacaaagtagaaataggcttagcatggagaaaaagtaaagtgagtccctatatatttggcaaatattaggttgaatgtgagttaagcagttttctctattataaggctttagagagattttaataagttagtgtattataatttatcaaatggaagaaaacatagttattgcaccctgactttacttgagacacatcactgttttttttttttttttttctcatggatctgtgtatggtctggaacaaaaaaacatactttgggcagtagtatattaggaaaatactatgatactaagtaaaaagatcttattctggtcacctaataatgacgcacatctgccgaacttcatgtcataaagcagtaatttattgtgatcatagattctgcagatcagggtttctagaagggcttggctgtacatttcccactcgaaggcttaggtgattgatgccagatgtgggggctgcagtcatctgaaggcctggctgagctgggagctatactttcaaagtggctcattcacatggctggcaagttgataccagttgttgactgagaacctcagtttttccatgtgtagctgtccacagggctacttccatgtcgtcatgagagggcttaaggcttcccccagtctaggtaatccaagggagccaggcagagtctgcaacactgtagccttgaaacccataaaccatcactagcactctagtgtttgtcacacaggcacagctgtgattacaggtgggaaggaagcaatgaggccatgaaattcaagagatgagaatgactgatggctctctcccttgacacagatcctgaaacaaaggaagtaaattgcatgaagacttggaaaatgcctcaggaaatcacgatagagttctgaatactagttaggtgtagtgaggttagatggctttgaagctggctgaatagccatatccagagaactgtgattaattgatattacatgtgagagcctccatggatcgatcagaaacctatattattatgtattattaatattttcatgtctgtttcttgttctatacactttaatgagtttaaaataaatagataaaagtatacttatcatagttttgaatgagcaaggtagaatagagggttgatttacagataatctatataatcaagattacagataacctaggggtggcaatgctgactggagttcaaatgattaaacttaacagtgtttagagtgaatttaagcatgcattttataaaaatctggctcccaaaatgtagcgtgaaggatagtaatggacacactaacttaagtaacgttattggccacagctcagtataaattcaggctgtcacattaactttaaaaacactgataaatttttaggttggttaataaaattaaactacctagaaccgtgtgccaatactgcagtcaccagccacatgtgtctattgaggacttgaaatgtgagtagtccaaattgaggtaaaaattgtacttcccagattttgaagacttaataaaaaacagaaaaacataatattaattatgtatcatattcatgatatgtttaaataatatttgggatatactgggttaaataaaatatattagtaattgatttaaccagttactctttattttctatgaacatagctactgaaaataagcttacatatgctgggtttgggttacatttctgttgctcagtgctgctcggtggatacaggaggtggatatatcagtgttctaagggcttattggaaaacacctgggatactctagccaattagaggctgtataggagacagtcataattctcaaagatttagcaattgtgatgaaggaattatgtaattgtggaaaaggaaaactctggaaaatatgggaagaataatagatatattcagtattggagggctatcacagagaaaagaagttagatatatttctaagcataaaactagggcccttgatatgaaatggtgccaggaaggcagattttggctccacataatgaagccctctcttaacacttgttttttcactaatagaaggcctagtgttgaagtcagtgagcctttttctctagaaatattcaaaagatgggtagataattgtccatcacaggcattgtgcaaggaaatctaccatgggtgagttatgttgaaatagttaaatttcactgttttccattaatccaagaaggataacagttttacttctgaaatacatcataccataaacacaggaaaaaagagatgtgactttccaactaatatgtcaagtttgaaatgttgcagcttatatggaccttgatttttcttgctacaaatttcaatcaaagcagtagactttgttccatgtaatcgtatcttttttgaaaagtatcaaatatggaataacttttcagagaaccgtaacagtaataattcttagtagaaacagaaaacttcaagttaaaaaaaaaaaccacaaccagatatacacacagagaagaaattcagaagtaatatttgctaatattttctaattataccaagacagcaatgttatgattcctagttggagtttatactaattaattttcaattgttttcacgctgcctattttaaaaaggaaaacagttaaaggttgtgtgttagtaaattaaccagctcaaagagagtgtatagtgtgggggtctctaaatagaaaggaccttagtgtttctgaggaaagaagaaatgtagaatataattagccatgaggtcaacacagttttaaaagaccttggccagaaaatgaccaaggctttatggtcaaaacatttatactttatttttcacagcaaatttttgttaagatataaaatataatctactgtacttgaaatagactgaagtattgcattatgatgcttaattctacttacttaaacttcatgatgtttaattaaaattcacacacatttttcttcccttttcctcttgggatcatttaaggctaaaactggaacttaatctgtgaggtaaatccaacaccaagtacagtgtatgtgcacattatagtcatttgtttgtttctttaataattgaataagtgggggaaacaaagcttgtctatattgggagaaaatatgcattttctgcatcttcctaattccttttcaagagacttgtttcaaaataagagataccttacaggctgaggaaaagctagtggtatttgtgtgaattttgatcttcataaagaaacattaaataatctaagttattcgtgcataattttgcaccttaaactagttttgcacctataattttgcacttaaacttgtgaatactgtcagacaatggttttcatcatattttctttctggataaaaaaattctgtccataatatttcaaatacaaaaacattagcaattttcaatccaaggatatcactttgttattattacttttctcttcataaagaatagaagagcacttttttgcagttgaatttcatttaatatgtatgcctgtatagtaacacattctgagggagagcattttattaataatttacattttctttgtttgcagattgaatgatgccatgagaacaattaatggcatagatgttcatttactctccctcataatttctaagcaaaagcatttttgtatttattgaagggatgcaaaatacaggcatcttgtaaaagatactgtgaaaggggaaattttctaaataatgaatgttgttaatagtcatgatgtttatgtagaatataaatttaaaacctataattaggttattgtggattatacctgtatttattagttattcacttataaaatgaattgtggtatttgttttcagaaaaatgttccaaattatggggcaacatcccatgccccaaaaaatatcctgtttcctgttattggagagttaggttaatttaaaatttcccactattataaacaatgttgcgatgatcatccttgcccttaaaactgtggctgcatttctgataaatcactgtatcaagtgatattaattttttagaggttattgaggcatattactgcatttcattccaagaagtttcaaacagcacttcctctagctttgtgtttatgtgtgttggggtgtgtgtatctgtgtgtgtgtgcgagagagagagagagatttttaaaatttaaccttttatgcgttattagttttgtggatgagataattgcatagaaagttcagataatttgctaaagatctgctggataataacagagctgggatcagaatcaaaggctcatgatattagccataacgttaacatgatctttttatgttaaaatactaggttaattaatcataaattcattcaataactatccatggaaagcttactatgtaagctttctcctgcactatatgccatggatatagcacagaacaaaacaaatgataatcccttgcataatagtggggagagataaagataaaagaaaataaataagtaaattacgtagcatgttacatggtggtaagtgctagggagacttttattttacattttatttcacttttacttacttttaagtacagactcacacaaatttgcaaatgagtatagagacctttgtattccttacccatcagcaaaatccccccagtggtgacatcttgcatacaaatagtgcattatcaaaaccagacaattgactagcataacataattcatacaattatagatcttaaacctgtttttgcatatgctcattttctgacatgcctttgtgtgtgattctatgacattttttattatacgtaactaccgctaccatcacaactgagatacagaactgctctgtcaccacaacgaaaatctcttttgcttcccctttatactcacatctctggctacttatctaatttctggcaacccgttttccatttctataattttgtcatgttaggaatgatatataaacagaatcatgaagtatataattttttgaaattggcttattttatattgtccaacataatgcccttaagttccatccacattgttttgtgtgccaagattttgttcctttccattgctgagtagtagacagtgacatgtaaagcaaaaaggaagatgccattaaaaagggtgcagttttcaatgcagtggtgagcaaagaggcattccacaggaaatgacacctaagtgtcgacctaaggaagtgaagaaagattcttgtgcatatttgtgggaagagtgtcctaggtaaagggaatatcctgagtaaaattttggagcagccaggaagcccttttggcctgagcagtgagagagagcacaagcattaagagatgacattaaaaaaaaaaagagagagatgacattgagacccattttaaagccctgtagactctacagtttgtggtaactgcagtaactgtataactatggtgattgtattaggtgactcaaatttcccatgacgttacttctaaactctgaagagattgaaagaattatcccttccctacgtgtgtagcaaaatgaatattttataatagaaaaatagtttaattgcaattttatcttttaaaaagatttccattttaaaaaatggaatataaagaactttatattccatttacgaaatgttgtgtcagtgttgtcaaacctttaagtaactttggcatgagacgggaagcatatattctattacttttcatcatccatgatttttactttgtgaaaacctcagttgggggatgcaaaaggaatagaatttactggaagaacagagatagcacctcgtatgaatcagaggacattgcatcacagttggggtcctcagcccagcagagaatatcacagcaaacactaaatagacctgccagaaaattccggtcttccggtccatttgggcagttatgtgatctaagtcaagtctcagtctttcactctatcaaagaataaaaagggtataagtcattttgacaggtctcaaaagcatcttagtaaatgaacaaagctcaggacatcaaagttgacgatgttaatcaaagactgaattgaactggtgcttgggggactggcagtcctaatctgattttcacaaacatgccaatatcaataaacttgcaggtaaacacacagccaaataaatagaagtgcattcatttttgctaaatactagatatttgatttctttaattctgtactatgtaattggaagcttacattttggtgttttacatgtatttctaacaccgcatataaactctttaaaggcagacacatgctgggtttttttttgtctccctcacatgcctagaatatagaatcagtatgtcttcagtcactagctgtgaaaaaaattcatttatctgacatcgaaaaacacaagtcattgcttttggttatgtgtgaatgtcgctgttgctgtaaataaattcagacacagtcaatgagcgttaacatttgattgttattccttctgcttataacaaagaactatgagatgaaatctaactgccaagaatcagtaggggaaagtagtcattgtgttaatttcaatgctgcggtgtaaatttcattaatattaaatggatttttatttaacaattgtaacttcaaaggggacaaaaaattaattaccttaacaaattgaaaagtcttcccttccgctgtacaggtaaggaaaataattaaagaaaaaaaaaaacaatcctgaagaaacactgactctcacatgcttattttcttcctgaaaatgtgagatagtaaaaactgaggaataaattaaaatttgcttctaatgttataaaattttgtcacaaaaaccataataaaaatgaaaatttcttatgatatttgtagaatattcaataatccttgagaaagtgtcaatatagtcagctttctggaattacaggtgtatgctgttgttatagttttaatttcttgtttttacatataaacctcctgggctaccttcagcatatgtgtccatgattgacagtaaagagttgctatttctgcaagtcttttcatgccgagatcaattttcccatttagtccatattaattcctaagtattcacatcttacaaaattaagtgagagagtgtaatctcaattgaggccatgggaaatatgagcaacctggtcaaggttttaaacctgtcatcatggattattttgtatttgtccctgagttcattctggcccaaaatctaactgcccatcctacaactacttagttaagcctttcctcccatcaagagtataactctggttataggctttaagtctggcttattttaagggtcaaagctaaatcaggccacttgaatttagactggtgtcactcgctgttcttaagggcaacataacatatggcattcaagcatatcctcctgaaaagactgaactttacctacagaggggtataaactgttcctcactgctgctggtggtggtgaattgatttcaaatgtagggttgcttatagttggaggatgtttccttttgctttattttggttcgtattttctgtttgttaaatacagaaaagaggctgtttatcctcagaaagtttttcttgactgctgcctaagttgttttctttcttctgggttaaagaaggttttctgggatagttaccgagaaatgacagtgatttttatgtcagaggggatggtagaatacctcgatttattactgaggcccaaaaaagtcaagtgacaaaaaaatctaggcagcggcagagtctgacctagatgatatgtttccaaatgctcaataaaagactgttgtttaaaatactccatgtcaatggcaaaaggaaaaattttattctctccaaaaaagttggtaaaagacagacatatatcttgatctctttcaaatactaattaccttgcatttctttcacatatgtactcattcatttttaaattattaaatatgaggaaatgcggtaggtaatagacataaaaatagttacatgtaattcctgcctttcatttgaagagttcacagtgtagttgggaaaatttgtataaatagaagaattacagaacattagagcaaggagcaaagaaaagctccaaaattccaagaagaaggcatcaaaactgttatgaagattgggtcggagttttccaatatttttttctttttaagtgggaagatgccttcaggcatgtacagaacagagccatgaaaggtcatagtgtgtttgcacaacagtgagagacttggtgtggtaggagagttgggaaataaagtctggaaatcagaagtttaattcatgtatttgctaattattttcaatccctgaagttagctgtgatgaaattaaatcacaaatccccaaatcctcaagggctcataaatcctcaaatcctcactggctcacaaagactatatgggatttttacatcaggaaagagctgcctatttgttggttgagaatgctgtttttatatggcacctccagtcctaatgagtttcacaagatcacaggaagctacagagtctcttgtgcaccctctgacctaggacttgcagtaaaagtagatgtcatggtcccccctttatttaatgttttcatccttgatgctcagggcttttccaatgcattcttgaccttgctagttccgtttctatttgagaatggacaaaaaaggcaagaggaagctctgagcaacgcctagatttaggaatgactgaccctcttagacttaaggtctaaatctgcattcggatttgggaacatctttttggttttccacatctacaagacaatgacactgatgagttccattctctccctttccaattggccactaaaacatctatcaaaggtagaacagccactacctacttgatcagcttccagccagatgaaatgtcttttgttgacactgaaataactgaattatttatcaagctctgttctaacccaaaattacgtatgtatacgtaagtgtatatacatctacatatatatgtactttttcgttatgcatattctgcagttgtatttgccagttgtcctcaatctggagaaatcaaaacctatagctaatcaatgggttcctttacaatgggatagaaaatgtattttctttcttttccattcatttaggtttctctgtattatatctaccaatttttctcaacaattttattcctcatttattttcatgctgataatgataactaagaggattttctactctctttggaatgagttagataatcatggtcctgataaaatataggtgttagggtaggataaaaaggaagacattgataattaaacttatcaaagaccagcaatatcacatgcactcagcttctttctttgcagatagtcaagagcttagggagtgttatttgaggaactaaaggtgtaaattctgggaagactcatcaaagttggatgatatggtggacagcatgaaaatgtcaggtaccttgggaaaacagacattttccctgtttcactattgtgagacaggtctttccagctcctcccattcttgatgcagaattgctgctctatcacatataaaaatgcaatttaattcaaatgctaattattgggtacctactaatagaattaacatccgctgagcctgacaagaaatgatatggaatccttagaagctatgagcctggcctttgaaaagtttataactgatatttttttccttgacttatttttagttgtgcgtattcctctttatccctgacatgaaatgtcacctagtatccatttccatcccagtattgccctacagaaaactctgggctctaagcaagacatgaatgataacttaaaattcccagcgaggtcattcttcatctttcactttgctaaataattgtggaacagtattttaaaagctatctggcaataacatataaagtagctttagaatgatgcttttgcagtcacagcactaaaacctttttttatgaaaacttcaagatttgtgcaaaagtcactttgtaaatgagagtatttaagacttccgtgatacgatggcagcttctattaaaacgaaaacaaaatgctttatctcattttgcaattttaaagtttgtttcatagctccatatcagatacacttttcttaaaatggcttataggccaggcacagtggctcacgcctgtaatcccagcactttgggacactaaggcaggtgaactcttgggctcaggtgttcaacacctgcctgggcaacatggtgaaaccccgcctctacaaaagaattagctgggcattgtggtatgttcctgtagtcccagctactggggtggctgaagtgggtggatcacctgagcctggaggtccaggctacaataaactgtgattacgccactgaactccagcctaggcaacagagtgagatcctatctccaaaaaaaaaaaaaaaaagacataaataatttcattaaggcaaatgacagaagagcttgcatattttctatttctttacatgtaagatgagcacttatctaacagtcttaagtagagttggcatctttccttaagttagatcaaaatcgattttgtttgtgtttagatattcaaatgcattttgcttaataacccaattagacttgaaaatagtgctagaataagtatgtgattttaacttttgcacaataaaaccttgattagctagaagaaaactaacaagaaatatcaattaaccagaaggaacaaaattataaggcaagctcaaaagaatctagaatttagaaagccgtatagaaaatgtggaagaaattatgtgctgaaggttataagcaaacatctaatctgattcctctgttttttatggttacataatcactgtttagatatttaaatcttctgggatcatttaagcgagttttctcctatgcattagatccttcttaccaaccagaaaagtggaataaaattatgacagtatcatcaacaaagactgaaagaaaagtttctgatgattattcaagtaactcgagtccagcagaacctctaattttcctggcattatgctaaaaatacatgcatggaggaggtgatagtattaaagacgagtttcccaggcagacagtttaggacacagaagtacagacaaggcctcggcacacacaggagtattctacaaatatcagtatagaaagtcagtgatgcaatgaggagcttgtataataggctttagctatattatcaacagatttcaagacccattattacttcaaacaataaagactcagaaaaagatacagttccttgcctccatgaatttaccatctaatgatggatgaggaaggagttcagtaattagacacataaaacagccgttgataaacatcataatgatgtttgatatgtccatgatataaacacatgtgaaatttgagacagctgtatattcatttgaaaatagcattcgcctccatctcaaatacaaatagtcttgcttgattctgtggaaatgtggcagtggcatcatgtgacaaagtttaaatatctgtgtaattatcctcttctctcaccaaaatgtaatgttctcttgattcttctatttctcttaaaggtactactacctatctaacaaagcttgaagccccggttatctttgtagcaccatcaccatcacttacccaattttgttttgatatcaaggaacccagctaatggttccactgcaaatacttaatcaggcctcttagttccctcctttgctatgattccagaagccatgtctctattactgccaggtacattctatgaaataatggctttgttgtttggatacattgacttgctgaaaatcttaaatggtccagtgccttctgttaaataatgtacaaactagttaccctgatatcaaagtctatacggtaggcctggagctgcctttctgacattattttctatatctgtgctgtgtttcctttctaccccaactgtgtgtgatcagtcttctcccagtccaacaccctttgtcctttcttgtgaggttaactgcactcactcacagatgttccttccttgatctccgtccctttctatccaactttttctatccttcaatgtttagtccaaagatcttatcattcatgcattctttccctattctctcatttcaagatgactgtttctgtcactgcactcttttaccactcctttggtttattataaatattggtctgttcattccatttccacaccaccacactagttagaatctctatctttattcaccgggattgctacaatagactcctatttgatctctatagccaatgtatcttacttcctctctagtccattctctgcatagaaaccagaataacttgtttaaaaacacaaaccagtcactggcttaaaatcaatcattgacaccacatttagaataaggtctcaatcccttaaagctctacaatgatatgcaagctctggcttgtctccctctctagttttgtctttatccaccgtccatgctccaggaacatttgatggaatgcatttttgagtgtattttatgccttcttacccaaccttcacacataccattctcccaactgcaatgccctttttcccacatcacacacattcctgagccaagtcactgtgatgatgtgattctgcttctcagaatatacaaatcaactccatctatgcagctcaggtagaattaattccactcaaatcatttgagtcatacaaaaagggggagagacagcttcctaaagggaagtccaaatgctataagaaaatgaaagaataaatgctagtcaggcaagagtgaaaatccactacggtcagtaatggctcttataaaaatacatagttatagaatctttaatatgcatgtgaagtatcatgaattacatagtgaaatatgcatgaaaaatgaagaaaactcatcattgtacatggcatgcgtatcatccaatggctaatgtagctgagttttttttgtcaagttagaaattttcattctcataccaatccctgtaacattgctattgtcattgcatctctgaaacatgttttcagaatgacagctataatgaaatatctgatgcttacaaaatgtgctcaaaaccatgttcatgggaatatgcatagcacattatttaaacagatgaagtctccagtgcacctcacaacccagaaatatccccttcattttctaactactttttcatgcagaaactgaccctcgttcttagtttttgcatgaaatttacagtagccatctgcttaggctgtgacctattttctttctcaacttttctgttaaagagaatcaactataacgcttatttaaaggaatgtgaataagctaaatatggggttgcagctggttcagactctctattgaaattctcatggcctggtataatttaagatctatttatgtaattgctgtgaagtcggagaaacaatcaaagaaagctgtgtgttacatcattttgccaaaagagatattgtgtttgtctccttgtttaaagaactgaactccgtagtagtaatctggcccatccacagatgtgcttaggtttaccctcacaatgttaatgcaaataatgactaaaacattcaaaatataatttattgtcgatatttaaaaattggggaattttatattcaaaatcatattccttttttttctcttgaaaaattggaagatctggcaatattggcatatggagacattttcccatggtaaccattggttcactctcacagatggggcattctctcttcaggtaaccttagcactcacaatttttaatagtttattcttgcagacttcacttgcttgtagtacctgtcaagcttttgtagacatttcagattgtaataattgcttgtcacaatgggatcctctcaaacaaaagatttggccaaaatgaatagtataaggagtacattgtgcaatataattttaaaattaagaacaaattgctcttgtgggcttggctatggctatgatatgggtagcaagaacttcccaagactgggctgtagttaaggctctgggtgtggcagtgaccatgggtcaagctatggctgtggatacagctgtggctatggattctctctccaatgaccatcaaattctcaaagctgttgatcattttgctgctaatttttgactttcaaacttttcatgcctctccctagtattccatgatgaatttcaagacgctcatgttgatttttcttacatttctctttattccttatggacagtgaaagataacatgacattccagtttgatcttctgcctcttgggcagtttccaatattttggtacaatcgacatttaagcatttgctcatatactgtcaaactatgggaatccaatgtatctatttgtatatatattttatttatcatacttcctaatgaaatgtatttacatttatttttaaaaaaggacaaatcactcaagttacaacctacaacaactagaaatcttttcagctacaagtacaagaaaactcaaacacagttggttaaaaaaagctagttattaatttcaaattatatctattaagtaggcagctaatttcatttgttctgtggctctacaatagcagccactgcgtttctaattgcccttaatctttcactgatgcctgtgaccttgctgtaagttggctaccatagttccaggtgtgccacacctattccaagcaaaagagtagattgaattaaacggcaaagggttgcattagttttgtttgcaccctttttatcaatgaaacaaagtatttccatgaagtactacctaggtgactttaattaaagtaaatccctgtccaagaggaatgagattataatgattcatttaaaacaatcataatttatccccttggaataacacagcatttgtcctctctgagattaagttatctcccagagttttcttagcatagaatctgggaaggaggtgaagacatttgtgtaggcaaaggacaaagtctgtcacacaagcgtctatgctcccatttactttcaagcaattttactctgaattttgtcttgtacttcatgaaggctccttccagaataattattgcctcacacggaattattatcaaaccaatcaatatttctgataaatgaggctgctgagctgttcattctgtaggttttattcatctccccttttatcttggattgcagtctaccttggcatgtgataggtattttgaaggaggtggaagatgtttctcagacgaaattattttaggatgtgataaaacaggggcaaatttttaataatttttaaatgtgtttttgttgacataaagagcacaatgcaatatgtattatcaataaatattcatcaatattcatcaataaattaaatatttattaatgaaaaaccttactcagaaacctcaagatcatgatttaggctgggatagcattaaacatgtattaaccagagacataaggcagggaagaccaaatatctcaataatctcttccattgctttaagttattcttcattctttgattttagacaagaaaatattacacaatttatgcaaaagttacactttaaattcctagattttgaggtcttaagtttgaaactaggtttattcagctgtggtgactcaaaagaagataagagagtggaggactcagacaaaaacgtccctgtagttgtcatcgcctagcctgagaaatgattggatttaaaaggaatttactatgctgaaagcaactcagattaatttaatgtgaccatttcaatgtacactcttgcattattcatgtactatctagatattattattttttatgcaagtctacagtcatttgactttcaaagtatatcctgtagatatcctagacctgatacacttggtataaattatggaattacaccgtaacattaccataaatctttatattcaaatgcagattgtgtctttctccatagctattcttcttgctcatctaaataatatgaagccaatgtaaattagattcataaatgaaaattatcactattttcaggattaagaagtatattaacatatattaataagctgttttcaaatctgtcatttcatacattatagtttttctcaaaaaatgtgaaacttttttatttgaaccttgaatgaataaatataatgatatattaaattagcataaaatattctgattattgagtataatacgttttcatggtcttcctacaagaagaaaaaaggatcctaattagatcaggacattgattaaatgcattagtgagtaaactgaagctagtatttactgaacaaatggcatattatactttatctgcactatgatctttgtagcaaaataatctattgattgttttatatagaccacaccacaaccatgatttggattcatggctgtactgggaagatgcttatatagatgtttcttttggcactcaaaattatgctgagggttttttttttcttaaatgatttccttagataattcttattatactattcaaacaactttcaaaataagtcactgaattatttaaactgaattattcaatgtttcaggtgaagtgaatactggagagggccagattcaggttagcttctaagctccgacacctatctctctctctctctttcacacacacacacacacacacacacacacacacacacaccaaattaacacctttctccaggcccataatcactgaaaaaccctatcttgctttaataccagtgattactaaagtgtctactcccaaaactactatgtgttctacctagaattttgaccctacattttacaagtttcaggcagttaaaattggtcataattgctgaaattatgtcacatgtgaaaaaatgggatgcaaatcacagatgtgtccttatacctgtttactgtaaggacagcaagcagagacaagagatagagacaagagaatcaagtttctatttttagttccattgtcactgtcccccaccaagacatccatttatcatttctgaggacaccagcagcaatgttattcctgggtttacaagtacatctgaagactaagaatttgttcttgggcaacatcactttgaccacctactgatttggggtagatgcactaaataaatcaaatgcattcattaaatcaaataaatcattaaatatattgattatagtagccccagtctatgctgtgttcacaaatccatgctggtattttaggagatttacataatctcataccccaaaggtaacaattattaatggttgctcaggaatccttccgaaaacatctttcttcttaagcacacatacaccaacacacataagtcttttaaaaatacaaaaggtctgtatactctgttctgttctgcaggcagtcttaataattttcatgtaatatctttccatgacaaaacacaagtacagggctcttctttttcatcatatcactaaaaatatacatttccttggtttatattgtagtctcttccccttgtgcaacctctgcctgttttactgaacaaatcactcctgacacattgggttgagttatctgctgatgtcctttcccataaatgttcccttctaatacaggggcagctctaaatcttaagctcctgttgagtactgggagaaaatatctaacttctgcattaatatctaggttttcacacctctaaactagaaaggacatgactatagcctgatgtcaggatctcattacttttcttctcttactttggtatctgatgttccaaatggatattgatggggaaatttatttccaatttaagaatcaagagcaaaaattcatcttctagaatatattatttcctattttatatgctctttcctggaaacttagaacatgtgtagaggaggaaaaactttcctctgccctcttacgtttggagctgtggcatgtgaattaaagcatacaaattgtattaatgtttttaattttacatgcattggaaccacacagaaaagaagtgaaaaacctaacggagttattagactcaggggcttatatactactttaacaaaggattatatatttaggaaaatgactaggaaatatatgggaaaactacgatgagaagagttatttagtaaggtttgtttatgcagactcatctctcagtactatctttatttcccgtaacgagggtttttgtcttcctgagatgggagaagggaacatttccacaaggaaaactaatgtgatacttgtagtcagaaagtgggagggcagagagctcttactgtttctgatttctctcaattaccttcagttataaaaaatcattttccaaagtggtatattttggtgtggcatatttggtcccttcatatgattatgttccttttttctatctaaagatggtatcccctaagtacatccttgaccttttttaccttcttatattagcacttgaggaaataccaaaaataataaatcgtgaaacctattactgatgaaatgtgtatgtttctttttgtcatgtatgtgtggtggaggaggtgcatagaggatatttctctgtaacttctagcttctttattggcaagcaaatagattggcaagcaaatagatttatttctgtgtgtgttttcaagtcattgtgattagcatggactacctttgaaatagccatttgagggtccccagagtctataatttttgaaataggaaaatttcaggatattagtatttttctgagtttaaaagcataacctaaagttaacttgtaggctttttctttctaatgctttttactgagtggtaaagatgagcaaccttttttttgtttaatagccagatactttttatactccgaatacaaatattgaaaaaaatgaaaggaaaaccccctagatcaaacttggtcaatccatggcctctgggctgtatgtggcccaggatgactttgaatgcagcccaacacaaattcataaactttcttaaaacgttgtgagatttttttttggcaggtttttttttttttttttttctcatcagctatcgttagtgttagtgtattttatgtgtggcccaaggcaattcttcttccaatgtggccaaggaaagtgaaaatattggacatccctggcctagattgtgagaaaagagatcccattacatttatgaatgggctgtgctgaaaattgacagcaacatcagaatcctaattgtgtgccagcagaaacagtgctattagattttctctgtgcttagcaaaggatttagttagggcattcactttcaagcacccgttctatgcattacacactctcatactgtcttaaccaataactatttctataaggacattctggtgaaattagtgtgtccaataatttaaactaaaatggtgacatctaatattttctcctccaaggtaacgtcagcatttcagagcactttcactatctgaaaacggccaaaaactgatagaagagctttctgtttacaactttatacaccatagtaaagttctaggatgcaaagcttgcacagctttgtaacataagcattttatgccaaattaggtgaggataataagatattgtgacatttgcccaaagtcacggaacagtacaaaactcaagatttgaacaataatttttctgactacaagaatcattccatttctgctagctaaatcaacaatgaaatacaatagttttgcattgcgacttagaggtaccccatgtattccactaaaataatttgtattttgttagaaattaaaatataaccacatgaaatatgtctgtgggtgtctctctctccctctctctctctgtacatactgaatttctaggtgtaataaaatgcggtcagaaagagttcctgcggtaccacattatttttttctttttgcaacatgacactacactacttctaagggctaacaaattttaaaactttcaaaaaacatgatgagaaaattgatgaaagcctaccatatagaagcaagaaggaggtttgaagtgcctttcaaaacagattaccagtctgtcattttgacaccacgtaagatggccgtagaattatccatcatcgagagtttcttcatcaagaaccctaccctccatctgtatagagcttgcaaactaaagcactgccttgttcagagtcttttctattgccttaaccctgtcttcttgtgacttcctttctaaattccacatgaaagtccctttctcaaggtataattttatgtaaacttttgagctgactttaagatttgtgggcatattgtggaaatactcagacatacccagcacatttttccagatgttccaggtgttgcagaggtcacagctccatcatggattacaaggcttttggtaaagaaagatggatcaaggttagagagtaaaaaaagaaaggcctactcctatttgtcacttcctgtgaaatgcagaggctcctacctaggaagacatttttcaggtgctgagaggactcttgggattttatttattgtgaaagttttatttattttgaagtatcattctaaaaacaagattaatgctcaaaatggataatcaacattatctggtacaaaacacatggacttacatgttaaaggtgttgttctttccttatcatctctgggaacttggacaagtcaggtaacgatgtatatattttataagacaatatattgtatacattacatgtacatttgtgtgtgtgtttatgtgtgttctctgagaagcagacccaaaatggtacttgtcctatttcaccctgaaaacaactcccaggagacacatggcctcagcatgaacctggcagtggattcagaggggcagctggatccaccatgcaactattggtcagccgctctccataacaggatctcttgaaggagatctaagtaatgcttttccatgtgccatagtgtatgaaatagaagatctgcacataatttagaactatgagagaaggtagctctgtacattgcaaggactcctgaagatctcattcaatgccgtcattgaacaatggcacgagcagttattaatgaaaaccattggtcagagactttaaaacttcagggtacccaagagtacatttcagcgtttgctaaaatgctattaccaatctcaggaattaggatttaatgaataagtaatgaggatgaattttaacaagcaatcaggggcatcctgaactgggtggtctctataccacagtctgaaaagtactgaccttcctaagcgatgtagaacatacaaaactgtactcattatagtatattctacttaagtggattatgtatgtcaggttttcatactaaaaaaaaattactctggggaattaagagttattttcatttattcagaaaatcatatatagtctatgatattatacaactgaggcatcaacaaataggtaatttttatgaaagttcagaaaggcagtagggacttgtaggcatttggagggcttcattttcccatgtcaattggtatctctctgttacagtaggtgccattatctactttaattgtaatgaatcactgggggaattgtatttgtgaatgacaggtactttcttatgcaaatgaattgcccgcagtgagctagtttagttgatcaagctttccaggtcaagtagggcatttcccagatatgataaataaatatcttgggagctaaagaggaaatcattacagcatatcattctatctgaatttcaaaaagtatttttatatttaatttgttccccaaatactttccagattgactatatatactatttcttgaaatattcactacattactgaacactatcatttttgtgtcattcagcctcacagaaatgttacccaaatgggatgagtgctccagtgaaaatatgaaagccatatgaaaggcaggttcagtataaatgcaaattgctttatcagaaacattgtgaaatcctccaaaaggtactaatttaaagttagtagaacacttttaaagtggcttttaatgtcaatatccctgtaattgtcagtatcctgaaaatagtaattatgacagaattataatttaacaacagtagctttcttagtttgatatatttgagtgacctaattaaagtcattcttaattgttttaccgtttgatttctattttacaaacttgaatgagagactgctttcttggtgcttagttaatctaggataatattaataatattaaaataatagaatagaacattagacttcagttttgtttctattaataatcaaagttattagtttgtggtttgtatttttgttttcataactgtgtgaatcatacatttattttccaaattatgtgcaacctgattgaggaccccttttaactttacagccaaagtacccagatggcattctgaagtatatcttacaaataacaaggtcaaataaggaggatgcacaggccatttgacagatataatttgttaaaactttatgtttttgtggaaaaccttataggaaataatttctaatgttctaatgtaagcttatgttagatactctgttagacattgtctaccaagcttccatggttttagaatcctgattttactctaactgtgggtacttacatatgaatctacagagaaaagtcctttctcctgtgtgaactagtagggaccaacgactttaaattctctctctaaggcttgaggtcgccgttcaaagaactaactgctgtcaaagagcccacagtgtgttcattacttttttaagatacgacaactttgggaggctgaggcgggtggatcacgaggtcaaaagatcgagaccatcctggctaacacggtgaaaccccgtctctactaataatacaaaaaaattagccaggtgtggtggctggtgcctgtagtcccagctactcgggaggctgaggcaggagaatggcgtgaacccgggaggcagagcttgcagtgagccgaggtggtgccactgcactccagcctgggcgacagagcaagactccttctcaaaaaaaaaaaaaaaaaaaaaaaaaatatatatatatatatatatatatatatatatatatatatatatatatatacgacaagctactgatttaagggcaaggaggagacgggggaagtatatttacaatcttcaaaaattatcttgtggatactgaatacctaaaaagaaaagctcacagtgatctattccccccacccccgacctcccacctaggtagtttggtagtttctgctgagatcagaaaatttttttttattctgagacagggtctccttctcttgcccaggctggagtgcagtggcactatcatggctcacaacagccacaacctccagggctcaagctagcaaagtgatactgttagcattcaaaacaaagaacaaattagtaatgggtgttttaatattaaactcatcttactgtggtcattatgaccattaactcttccgtacgaaagtattttgaagtgaatcatcagggactctgagtcagtggtcttgtcttgatgtctcacaacatgggtgcctctatttatttagacatctatcttcaccactcactttcaagtgaaagtgaaagagcaggtcatcaaatttcagtattctgttattttttgcagtcgggagccgtatggaagctagcccattacctaaattgagatgatagaatttgcctattgaaatctcaaggactggccaggtgcagtggctcacgcctgtaatcccagcactttgggaggccaaggcgggtggattgtctgagctcaggagttcgagaccagcctgggcaacacagtgaaaccccgtctctactgaaatacaaaacaaaacaaaaaattagccgggcttggtggcacgcacctgtaatcccagctactcgggaggctgagacaggagaattgcttgaacccaggaggtggaggtggcagtgaactgagatcacaccactgcactccagcctgggtggcagagcaagactccatcacaaaaaaaaaaaaaaaaaaaaaaaaaaaggaatctcaaggattgaaagactgacccattgcggtgttatcacgtccaaaaaaagtaggcatgttcacatactgttttgagagaattaggaaaattttatgagaaagttatttggaaaacatacaaaattaaatgtatttttccactcattttcaaaatgtactttagcacaagaggcctggtgcatagtatatatgagaagtatttaaatgaagggatacattttgtatgatttttcttacaaattcattaaagtatttcaagtaatatagaataattatttaaccagtgttgcaatggctattaattttccttatggaaggaaaatagacaaaggcgtattattgattttcttcttaatctttttaagtttttttaaataaattggaaaaatacaagtttatatgtagatttacttatatttgggggtttaaataaatgttctgcatcgctttgccgcttctcaacttgccccaaagcaaaacgaacacttccatggtgtctcttggaactcctctcctttcatctcccaaactgtcctatatctttgaagtcgtttctgaatatatgcctcatctccttcctttctgtgaaatctgacagtttgtcaaaaacacaaccctggtagccttttataggtgatgacaatgttttattccatttcccacatgttatagagccagtatataaagtaggtgctttacttgttcctcattgctacttcaaagtcatatctcaccttttctgcttcaaaaacccagaatgtttgaagctcaaagtcatcgggctgtacaaatccttcccccttttcattgttataacccactgacatttgtcattctctgccattcatttaaggctgtagattctggctcgctctttctcttcatctctacctctgcctctattctagtcaccttccaaatccacgtggccttaaaaccacaggctttcaatcccttgtcttacttgtctccaatatattttccttcaccctaactcagatgatcatttaaaggttgagaccatatgctttttcatcactcttatcagcatccccctaagatcaatcatgattccaaaagttccacactcattttttctgtctcctgatccatggttaaaacaacctcacatttgtcaattgtttttatctctttttaccctctatcatctcctcctattataataaacatagattaccagtccaaaattataatcactttcttgcaaacaaccttaactattttacctttgtctttttgaatcatgcttatctatcaaatctgggttttattcagtcatttgcttatttttatctaaaacataatctccccaaaggtacacttatattactgaaaaacactatttcagtttcctactctgcatgattattttatatcttctattgtctacataagtttaagttggctttatcaaaagcctttctgatctccatagccaaggaagttccatagctattgatttcaactcattggtactgggtgatcacagggaatctcagtgatcagagattaggtaataatatcttcccggtcaggaaagtttgaagccagttggctatctttctttctatatgacagttattcatacacgaaggtgtgaaattttcaactacctttcctggaatataattcatgggtatgtatcagtaacaatgtatgtctccttttatgaacatcatgggcaaaggatgaaaacaaaacaatcacctcttaaacgtgtcaatcagttaccatagccaagtgcactgtgacattatgattgtttcagagcggggagcatttgctgtgcatcattttatcctgaatgtttttcctaaccctgactcatggtagtcgtcctcaatatgtatttatttgaaatgtatgttttattttcctgttagatctcgtaaatatcagacttccgaggacataaatctgttaaagccttgtctcatgtttattgtttttgtgtatctcttaaggaaatgatattttgtttttatattttctgatccgaaaagagcaaaagcccctgcactcgagagagctgttacaatcaaatgagaaaatggaaaggcaaataaagaagatgtgattccctacagctgtgaacagtgatgtggaaaatatagtggcttttaggtaatatagggattcacatcctgtctctaccacttactgcttgtgtagcattgtaaaaacaacactaaatctctctcagataattaagacacggaatctgaaacacagtgggcacttgatacatgttatccctttttatactcctacctcttcgtaaggaaatatttctgagacagaataaagttcagaatcaaagtaacaagatgcttaagccattttgacagaaaatagcaaatatgtggaaaacataacaaaatatcaaacacttatataggttaagggggatgtgcccaagagctggaagaagagagattttctctataaatgattcagctaagaaattatagaatgataatatgaagctattcatctgtattcaaatttttatctaaatgcctaagattgacatgcaatatatgtttgctcttaaccatttgtaggaccttgataacatttaaaaataggtttacattcattcatttcactctccaccacattctctttttgaatctctctctctgtgcccccttctggaagcctcttttaattacttttacagagtggaaattgtatttgttaaaatatgccagccctcgatattcaaataaacatattccaattatggaaaaatgtgagatggaatatatttaataaaatgaggtctctaattattttttcactgaaatttgatcatgtcttttttttttttttttggtcttagtttttaaatgttttatttttattttatttttatcctgactgtctgcatcctacttgctcaggtaaaaaagtaagacactaaaacttgtttaaagataaactattaacaagtgttaacttaaggaaacttctagaatattttccatttggaagtctatttttcacggaaatagagccatgttgtttatgttaatttgtacccagaattttctgcttactgaaacgtgatagaaagttctatttcaatacacatatatctaactacatcattcattttcaaagaccttgtggtattccaggatataaatgtaccataatttatttagctaatattcttgaaactttttgagatgattcaaaatcaaatgaatttttagtcataacaattctctgaacatttatcacacacagcctagtgttttcaattgttttactcaaaagagaaagtcttgaaaaaatacatcagatggtaaaatgtcaatttgaagcagtgtttcccacattaaaaatattgacatttttctctttgccaaatttaactggcaatttaaataacatttctgtattcatttgtcttttattgatagaagaatcaatagtattagtcagttgggttagagtgggaagagctggaggtctggaggcaggtcctgggcttagacgtggcctttgatgcttgatgttcaaatgctaaaggcattttccctgttttcattgggagagggtgagtgattactggagtttctatattctggcaccaactggccttcttatttcctgtgacacggagagcaaaatcatgaaaatgttatataccagaagcagagaattctctcctacctccaaaaagcagaagttagcaaacactgagctttgtgcgtaagtatgtgtgtatatatgtatgtaggtgtccctgaagataatttacatttttgttttatatgttttgaaactgttgaatttgaaacaattttagtttataagaaagttgcaaaattatttaatgaaatactataaacccttcacccagattctctttcactatgttttatgtacatacacatttacatacattaatatatagctattttttctgaaccaactgagaataagttgcccacattatgcccttttagctccaagtacttttattgtttatttatcaatggcattcacttaaaaatcataatacattgataaaaaagaaaattaatgtacgtaaaatgttatcaccaagactagaggtcatattcatattttgccaattgttctaatgtcctcaaggataaaaaaaaatcctggtccttagtctaatctagattcacacagtacttttatatggcatgtctgttttgtctttgtacatctagaatatttccataatctttctttgtggacttgatatttttaaggagtacgggacaattattttatagatgctgctccatttaggtttgcctgatattatcttgtgattaggtagaggttatgggttttttttttgtttattttgtttttttttgtttttttttgttttttttttttctttgatggagtcttactctgtcacccaggctggattgcagcagcatgatcttggctcgttgcaacctccgcctcccgggttcaagtgattctcctgcctcagcctcccatgtagctgggattataggcatgcgccaccaagctcagctaatttttgtattttttggtagagacggggtttcaccatgttggccaggctggtcttgaattcctgacctcaggcgatcagcccgcctcggcctcccaaagtgctgtagttacaaacatgagccactgtgcctggtaaaggttatgtatttttgacaataatactatcgaagtgatattgtgtttttcaatgtgcaacaaaccaggagccacataatgtctaggggttccattaatgatagtagttacttagatcatttgattagggatagtgtgattttgtcatttaaaagtatttataattttctgtatataaatatatcttatatacgttttttcctaatgtttggcatccactgagttttcttgactgaaaaaatttatgatttttttctatatggtggtttttctcttcatttttttctatgctaattaattactgtaacaaagcattttccattctttcccatttattcattcatgtgtttatttatttatttatgttactatagactcgtggattcttattttatcctatgtcttataacatattactattaagattcgttttgatgatccaattttctagatttggccagtgggatccagttcaagctggctcctgtgtctttcaaaaaaagtcatcattctaggaacattgtcttattttttgttactgtaagtttttccaggctcattttgaacatatcctgctccaattcaagaatgaagtatttatccagtgtatttccttttagtaaagaattatattaaggcatcaggagctggtcttaggtatgctcattgctactgtaatgacgtgtacatacattttcaaaatatatttaaagacactttccagtatctgtctctagctctttattataatccattaattcataggatattcccattctcatttaatattacagggtttaattttgccatcatcctttctgtgtttttatattcctactttaacattgagaaacctggattccattacccataatgtatttactatttcctcagccttataagagacgtaagtagtttgaaattgctaaattgtgccattgtgaaaagcaaaccgactcattacatttcaattaaaaatttactttaatcagagagtatatgtcaaagtacagatttcaagtactatttggtgtcttttttttttcttttcagcacatcttgactattaatttgaaacacggtttttctcccatgcttgtagattccagggatttgtttttatatgtgaaatatcaatatataattctaaaatttaaaacgatacaaaaatgtataataaaggaattgtcaccgcttctcaccttttcaatccatttttaaactcttattcttctttccaattctcaccctctccttacagataaccagactccttagtttatctttccagtgtttctttttctcacatatctgcaaatacattatattgtatctccttctctgttacagaaaccttagcatccctttgattccttttgcactttgcatttttcacttaatgttgtagtctggatatcactccaaattacctcttaaagattttctcattttttttttttttacaactgcgtaggactacattttatggaaataggcaagtgtactcaacctctctaatggataagcacttcaattgctttcaagttttagcgattacaaacaatgccttcatggataaccttgtttatatttttgaagttggatcattaaggaaaatgtcgagacattcatttccgagtcaaaggtaaatgcatacatagttttatttatattgtcaaattctcccttataaatgttggaccaatttacattcacaatagcagtgtttgagagtgccagtttcccttgaactttgccattgaaatgtgttgtcatacttttaaatttttgttaacgtgaaaggtaagaaatatttcagtggctcacgcctgtaatcccagcactttgggaggccaaggctggtggatcacctgaggtcaggagttccagacaagcctggccaacatggtgaaacccagtctgtacaaaaaatacaaaaaaattagccaggcatagtggcgcaagcctgtaatcccagctacttgggaggctgaggcaggacagccacttgaaccctggaggcagaggttgcagtgagccgagattgcaccactgcactccagcctgggtgacaagagagagactccgtctcaaaaaaaagaaaaaaaaaaaaaaagactgggagcagtggctctcgcctgtaatcccagcactgtgggagactgaggcgggcagatcacgaggtcaagagattgagaccaccctggccaatgtggtgaaaccccatgtctaggaaaaatacaaaagttagccaggggttttggtgtgcacctgtagtctcagctactcaggaggctgaggcaggagaatcgcttgaatccgggaggcagagcttgcagtgagccaagattgcgccactgcactccagcctggcgacagagcgagactccgtctaaaaaaaataaagaaagaaataatatctcagtatattttaatttgtatttttataattgcgatgaggttgatcttttttttttttgtatttttaaagttcattttttgtctatttttgggggtgattttgtcttttgctcatttttctatcgcgtacttggtcgttattctaaatcccatcactctcaatttttttttctttcgtgtttctgctcattcccatggagttaatctgggtatgttctccacttatgcttcgcccaggctaagctgtcagtcagtgcagctcattctgctacccttctgctagccctgtttccttgtcacctaaaatacactttttaagtttttaataatgttgagtcagcattaacagaataaattggccacattgggccaattagtgagaagtctcatttctatttttgtggcattttaatcctttcttattctgtgtttctgtttccttggtgtcaatattcttatatggatatgtgatagtcttccttagtgtctttctactgtccatgccataacaaagttcctttctttgctaaatgtgagatgtgtacaagtaatatcttacatggatactttgcaacaattgcatgctatatgtattttcaccaccccttagttcacagatgaaaaaccacgttacagagagataaataactgaattcatacagcaagtaattgatacaaccaaattttcaaaccaggcaacctgctttcagagtttgaactcaaaaccagcaatatatatgctgcatcagataagtgtatttcattgattttgaaaactcaaagacatataatactgcatcctaagctttaaaaagacaaaagtttgttggctaatgtattaggtaaagaagttatctgattttaataaaaaagggcaaaagtaggctgcagttcatatattaagtaattacaattctgtggtgtcattggtcttgaaaattaatttatatttaatttgttatatcagatattaattatacttggtagaaggacaagaattaatacagaattcattaataaaagagtgtgctggtttattttaaactatccttagattgtatctacgcaatcaagggatatttttggtctatttgatgcgagaattatatgatccaaactgaaatgatcactggggaagtacattttcacctgataacctttatttaactgacacaattatatcaggcatgaactagtacaagtatgcattcacagccacagccatgtgcatactgcataacatctgccagactggaggcaccatgagtcactggagtaaaccaggagcttagctgacattgtcacatggtcattatcctttattattgttaagaattaattttattacaaatgtgaactaaaactaatttgaaataaaacactaataaaatgctaattaaataaaacacatgccagtactagttattaaaattagataaattaaaaataatcagaaaacaaatttttatatcatcaagtattgtttaaatcaagtttactgtgattgaaattaccttacggttatctgtgtgacacagagatgaaggctgatcgtcaaagaaaattctaggaaacatactttttctgacgttgaaaagttgctttctgaggagtctttattcctgcagagaaatcaacacaaccgggaaactcttgtctctcatgcctgctgtttgcttattttacacaagtgacattcatcatggcttagttgatggaaactgagcaatgcttgaagttttaagactacatctgcagagcccaaataagcagaaagccttaaaataatctcatgaactcaatatagtcaggatagaataagccaggaaaatcccaaatccccatttaacttaatcaccctaacagttttaatggcacacttgtaagaaagtaattctttactggtgcccaacaccttctgtatacttcattaagggtaaaatatatggttgagtctttcacatagtccacacttcagatcgcccagaatctcattctgtgctcacatgttttgtgtgaagtttggaatcagtagggttttcctttgaaagaactcactcctccacctgccatcttgctctgtcatcttcaggtgaatgccaaatattggttctgagttaatgctgtgtggtgttgttattctaacatcccaacaggaaagtgccaattaaagggaaaaagtgttgaaaataaagttattttgttaaaagaacatacgtaggaatgcttctctcttaaatatagttatggatcaaaatacagaaattaagtgtttgcataatggaagactagacaatttgaatgaacaaataatgtaactataaatataataataataacacagaattgttattcagtatacttgtattttacatactgccttgtagggttatttccagtgattaacgtatttcacctggcatttgttagcacacaactgactgccaccaccacaggacggagaggggagtcggtgggcattaaccacagtgtaaatcaggttgtggaaatgcagaggcagtcacttgccttggcactcacacatctaatgtctgaagaagccaggacgagttcctatgttgtacattctcagtctagtttttcttactggactcgataaggaagcagaataattagatctatggagatattaagtatgagtcaacacaatgcaaaaactatcaaagtagccaatcactctttgtctttgattgttgccaacatcttttttctccaactcttattttggattcagggagtacctgtgcaggtttgttacctgggtatattgcatgatgctgaggtttggggtaagaatggtcctgtcacccaggtactgaacatagtacctagtagttagtttttcaaaccttacctccctccctcccccatatagtagtcaccagtttctattgttgccatttttaaaatccctgagaatccaatgtttagctccctcttataaatgagaacatgtagtatttggttttctgatcctgcgttaattcacttagggtaattgttgccaacatctttaatcagagatgcaatgtgtagaaatatgttagcaatagaagcatattgaaaatggacattgatactgtgtcattttgttctctcttaatgacaaggacctatctaagagagttaagttctcctttgttccaaaacaacttgtagagttgttgttcctttttttttttttctgattttagaaaaaatatgtgccattatggaaaacatgaaagtggagaaaaatattaaaagaacaaaaatcacccatagtctcaaaaccccaagtccattccctgaagcatttttattatactttcctccaatatcttgtgtgtgtgtgtgtgtgtgtgttttatgaagtaaaattatgcagtcctgaagggaatataaagcaaaccatttcacttttccaaactaaattattacggaccatttttctattgaacaattacatcactcaatttaaatacaaagtattttacccagctattgtctgaacaaatcaaagctgtctaattacagtattgtatattgtacttttttaaaagcttgatatattcaaagatcaaaagcatgtaacaccacacctgggttgccatagagatgtctacattttatcaagattaaaaaaaacttaacaataaatgcatttttataggtatgctaaagacttaccataacttaaacacccacaaacattttttttttttgcatcaatattctgggaaaaatacaggtgcaagatattatgtgccttttaaatagcttcattttctaaacttacgtctttttttcttctgatgcatcctttccactcacctattttttagtttagaattgtcagtgaaaaagttatgtttttcaaactctggaaatatggcctgccaaactgatagtgtgaagtatggagaaaaataatgtgtatacacacattgcacaacatgtacatgtacatacatgtatatatgcacatatgtaaacacagatatgctatatgtgtatgttatatgcatacaaatgtgttttttatatctgtttctactctatgtatatacttacaaacagagcacaagcatgagattcttaaaatgtacataggacagaataaaggtcatctgatctagataagagtcatcatacatattcatagctctgaaattatctgagagtttggggaggatatttctctagggacctttaaccttaatgtcagggtgttgatttgacaagcatctctaaagaatccatcactttattagaaaaagcaaagtgtaacattattatttttttaacaacccaaactttaaaaacctttggagtaactcttatgagaaatacctgacttttgtaagccatgactacagaatttcatgttggcagtggcagaaaagagagtgcagatggagaggagcctaggtttccatctgtcatagcagcatgcagaagatacactgcttattgcttcagctgtttctaaatgctgagatagagtcttgaaaaggaacaaactccaaactcatggttctttaagcagaatttgtcagctggattcaaaagaagcaaaaatgttagcatgatgaaataatatgcaggtagagcctgagaaaacctattaatatcaagtaggaaatagaacagtcagagcatggtatagtcatgttattgaacagagatgtaaaggggagaactataaattcttactgctgaagtactagccctgcaggacatacagactgcatgaagcccaggcttcctgggattttttttttttttttttttttttgagaaggagtcttgctctctcgcccaggctggagtgcagttgtaggatcttggctcactgcaagttccgcctcccgggttcacgccattctcctgcctcagcctcccgagtagctgggactacaggcgcccgccaccacgcccggctaattttttgtatttttagtagaggcagggtttcaccgtgttagccaggttggtctcgatctcctgacctcgtgatccgcccacctcggcctcccaaagttctgggattacaggcgtgagccactgcgcccggcctttttttttttttttttttttttgagacagagtctcactctgtcacccaggctggagtgcagtagcgcaatcttggctcactgcaacctccgcctcctgggtttaagcaattagaggtgtgtgccaccatgcccagctgatctttgtacttttagtagagacggggtttggccgtgttggccaggctgttcttgaactcctgtcctcaactgatctgcccgccttgacctctcaaaatgctggaatgacaggtgtgagtcatcacgcctggccaagtatttttaaactcttggtttctagtgttattctcatcttcctattgctctgtatgcatcttttggtaactcctccctttacttgagctggcctggttctctactctttgaaccactgaagcttaactaaaaccatgccctttctaaccacagtccatgtgagttcccataattttcttgggttgttgtaaattaattcaatcatctgccatccattcatccatgtaatgcaggaaccacggtgtcacttcattcttccctccacttcactgacttccccgttttccccatctccaccctagaccctgtctttccacctcattttcaggattaattagccctcttcctccttaatagtaccctctcagtatagtcatatctcttccctgaactaccatgaaatcttggaaactgtttttctcctaccagtcttgtttctttatcattccccacatttaattctgagtaattaatgagacataagaggactttttgtttttctgattaaaggtctatcccaagtttctcatcatcttgtagtaagttctccatggcttggttctctctacttcacctttagctcctgcaacacttcctgcctctgattcagttgctttccccatgtttaaattcttgtgcacctccctcttgttcttcaacacttaactaaatggtcatttctttttgcaacaaggctttcttaaacactctatctggaccctcctctgtgcttccaaatttgtactacctctaactgagcacatctcattgtctgttgagtaaatatcttaattggtcttccactaagctgtcagcttgttaatggtgaggacttttttatagtacattcaaaacctggaacaatgcctggaatatgccagtgaccaatgaacgtttgtggaatgaatttacctcgggcattgcagttccttagatgtacgtgacctccagggccctctcacattgtccccttgatccatgattctctgcagcagtgttgtccgtggcggcttgtttacctgctgtgccagacccagtttgtggtcatcactgtgtccatgagaataaacagacacagctcagagatgcctagaaagaaagctctgtagaataagtgggactcctgcatggtttccctgagaactggttttgctaagatcatcttttgcccttcagttttattgtacagcaccttcaacattaccttcctgtgattgaccatacatttagaagaatccttcagttgccctgctttaagaacacaatcagttattttagaaaggtaagattgataccaacatgaaaggctgagcagctgtaccgagtgcagagaaataagagtcacctcaggcatcaaactgttcatagtcagatttagaggaaatcaataaataaacttgctcatactttactatatttagttttgattcattggataaaatatatctttaaatatcatcataagaaagtgagtgtttggtaccattttagagtttgaatttgaaaaggatttcaagtgtgaggagtcgttctcctctggagatatttcacaggcaccatcattagtgtcaagtggagcagcctaggggggcccctttacatttattgtctttgttcctaaaagatcaaacgtagtttttccttgtacgtacagaagctaggagcttgccactttctcaggaggtgctagctctggctgaattcaatttgtgttcagaactgcccgaagcagaatttcatacatcaccagctcaggatctcacccttgcaattatccatgttgaaagactgtggcaggcagaataatgatcccccaaaatgtccacaacccccagaacttgtgagtctgccaccttttatggcaaaggggaattgaggctggaagtcagttgagagagcatactggattatccaggtgggcctaatgtaatcatatggacccttaaaggcataagaggaagaagaaaagccattctaagagatgtaataaagctagaggaagtgacgcatgagctcaagaacgtgagcaccctctagaagctgggaaataccttcagtcacagtcagcaacaaaacatagacctcagccctacaactacctgcaaagaactgaattttaccagtaatctgaataaacaaggagatggatttttccttagagcccctagaaggcctcctcactgtcatctttattttattcttctgaaactcatgttggacttgtgacctacgaaactgtaagataatacatttgtgttgtttgaagctactgactttgtggtgatttgttactgcagcatggaaaagcaatacaatgagctatcaaaaacattgatcaccttatccttgatagggccaggaatgccttaaagaatatcacaatctaattgccaagaaaagataaaaataaatggaaatttcaacaatgataaaggaacaagacagtattttgagacggtaattggttgaatggtgtatagcagtgcatgataaattggcaaataaattctgctaagttttcagcaaagtcttaatgaaaagtcagaaataaatgagtctcaggttcctaatctcaagaatattttagacgctaagcacagagttgctagatagtcttatgaaaattgcttcatttaagagaaaatggcatatcattaagttgaatatttcatgatattgaaatgtagggactccagttgaatttgtcaggaaaatgggaagaaggagactgcatgagaaccaaacttaaatgtacagattggaggatttgaaaacggttgagatggagaggctttccagaagagaacaaattgatgagcatttcagagttgacaatgtctacattacctcctgagacatcaaggtcaatgcacatgtgccgaaagccactcacaaaattgaagtccatcctccaactccaggcccacacttactcacaagcataacttcctcacctcaacagtgggcagtacataatttctgaaaatgagacaatacagagtaatctctcatgcatctttctttgatgtaacagagaccagcctgagttgtaataaatttagggaaagcattcactattattttggtttctaactcttctcaatctgggacaaaatgaatgccactgaaaggcaagaaaaatactcagataatctctcttttccagccaaatatgggagtattgaaggaacaaggagatgacagataaagatgcttttagagcagctcctaatgctctctctctctgttcctaaatgaatatggccaaggctgaggagggttctacttatgagaaattgtccctgaaagtactccagctgctcactgactcccaggcctaaggatagtcagtctagaggaagatgctgcgtctaatatctcttcctgcctagggttccgtagagtctagtttctgtggaaagccatgtatggcgataaaatgagtgtgatcctcttagcaagaaggcatgggtggaatttctgccttccgtgtttgctaataaggggacttcatgccaattacctaacctctctgggttttagttttttcatttgtcgatggcactgatgatattaatggagcctctctcagagtaagcacttatggatttttgtatgatttttaatgcgatgagataaatcttcagtaaaatttgaagtattataaaatgttagtattcttgtagttattattgcattaattttctagggcttctataataaagtactgtcgattgggtggcttaaacagcaaaagcttatttcctgtggttctggaagctggaagtttaaggtcaaggtgcccacagggttggtgtcttttcaaggtgcccacaggattggtgtcttttgaggcctttctctcgggcttgtagatggccattttctccttatatgctcacatggtgttccctttttgcaggtatgtgtccaatatttctcatatgagaactctagtcacattagattagggctcaccctaatgatttcattttaacttacttttctctttaaagaccctgtatctaaatgcagtcacattctgaaaaactggctgttaggacttcagcatacataattctagggggacacaattcagctcataacattattacaattattaattccagttcagtggttaaaataatatttttgcattatgacagtcataactttatctattaaaaaactgaatacctatttcacgttcctttgaggctttataatcacaaagtcaccacttctcagaaacaaaagcaagctggcagccttgctccactgtctctcctttgctcaaatggccactgaaaccagtgccttggcctctgtgggctttatcacctttgacatgaaatactctcttcacagtataatctcattttttgtgcaccataagggaatccatttgaaatgtagaagttgactccaatgacaaaatacatatgaaaaatagtaactttctgtagtaactctaaatttccttctgggaaaacacacaaacgtacacgtgtacacatacacacacacaaccccccacccctccaactgctaaaattttcatgcctaattgatattttccagaaaaccatttaagctgctttcttctattatggcttctctcctaccaggcacagaaactgtactgaatattagggataagtttcagtagccccatttgcattcagtcctcagacaagcgaagacatggacagtgagtaacatttatcctggggaaactgatcaagaaagagaagccacctggataaaacaagtcaaggaaatttgcatactcagaaccatgatttgagatgctaatcattacagaagcatgttttattggtccatttaatttgatttggagagaaatctccctaaaggatttggggattttgcagacctaaggcactgacatacagagtaaagttggattttactatattacttgtccctatggaatcagttcatcaaggctgctaataactaaagcagtggctttcaaacttgaatggctttaagaattatctggagagcttgttaaaatgccacaggctcaaggaattctaactcattcagtcctgagtgggatctggaaacctacacaatatcaagcccgcttcctcaccccaagtgattttaatttttctaaccaacactcacatagtgtttattatatgtcagacactgttataagcattttataaatgttaacttatttcaagtcacacaatttttacattttttttcccattttttacaggagagcaatggagacagagttgcttatccaagggcagtctagcaagtggcagagctggggcgtgagtccaggcagttttgttccagagtccgtgctcttggtcaccttactttgatgcgtatcctccaccagcacactttgagaaacaccacagtaaggaatacgcacacagatgtgacaactgcccctacaaagcaaatcattcctgtcaattatggatacctgtctcatttattgaaaacctacttcgtgccaaggactctggtagacagacaagttttttaaagcattacaaaataagtgtgaaaaacaaaatcctaaatgagtcttgattaacccaattgggtctctctgtggcctaatggtggaaccaaatgatgtagcagaaggaaagcaatgtttctgtgtttccaaatgctcaaactgcttctgagtacaccctgggctccatccagtgcagaacttaagaatttgctcctatgttttttactttttcttttaaaccagtatttatttggaaacaatttcaaattgacagataatatttaaagaataagagtagtataaaagaccttcatatacatttcactcagaatcactgaccattaacattttacctcattaggtccaacagttgcaaattctctctctctcagtttctctctgtccacataacgtatacacattttttaaaaattaattttaatttttgttttaagcttcagtgtatgtatgtacaggaagtgcaggttcattacataggtaaatgtgtgccatagtgtttcgctgcacctatgaactcatcacctaggtattaagcccagcatgcattaactatttttcctaatgctctccctcccccactccaccccctggcaggccccagtgtgtgttgttccctccctgtgtccatgttttctcattgttcagctcccacttataagtgagaccatgtggtgtttggttttctgtttctgccttagtttgctagctctacccatgcccctgcaaaggatatggtcttgttcctttttatggttgcatagtattccacagtatgtacacaattttttaaccattagtgccattagcattttcttatgggggaagtattggtactttgtcccagcaaataaaaataataaatgaaaaagttggttagagtgtaatatatccacttgtcacaatcattttagcagctttagaaatgctattactgaaattatttatctggaatcagttatttcatcatatcatttaatttccaattgatcattataatcaacattattatcataactgtttttattgagcacttgttatgggcaaaaggctttttgcattatcttattaatccacccaatattataatattataataatcctctctgtctctgtgacagtaattcttcctatcttcctcttcacatgtgctcctgcaggcacgctggcttccctgtggatctatgaacattccaggcacatttcggtctcatggcctttgcatctgctgttctatctactggaatattattaatcatgatattaataaatgaattcttgcattttcttcaatgattcactcaaatatcaacactttagtgaatccttccttttccatatcatttaaaatttcaacacttccctaatattttctttcccccttcattgttgcctcattcccatcttacatatgtcaattacattttttttcccttaaacattagtttcaagaggccaagatatttttctattgggtgtattcctgtttagcaacccagagaagtgtgtcagccatactgaggcctcctttaaatatttgttgaataaacacccattgttaaggtacggaaaatgaggcctagagaggttagatcacttagccaaagacaagtttcgggaaagtgtcaaagcaaatatggtatcaggaaattgcctgtagggcctaaattctccgtacgtctagtcagctgggagaaacctgaggaacataattgagtttcgtcttttagagttttacattctagagcttctatgctcttggtggagaagctgatgcacacacttaatggctctgatttttgttgtcacttgtgcccagcttaactatggaaaagaatttgatttcataagaataagtgctcttagtagtagtactagagacacacctcccatttgcaaatatacttgctattttcctagtatttttacatacattgtttcattttacttcataatgggacagtaaatccaggttcattatcacctttgtgtggatgaggaattggaagcccttttgggttagtgattttctcgaggtcatacagcaaaaatgtggttgtatcagaactagggccaaggttcccaatctctgacctgatttttcaccaacaattttcttgctcagccgctcatgctactatactctgttatacaaaataactcttctaaataaataaaccaatgctggccctataaaattataggtatggtaagaacagtagtctcagtggtatctgcaaattcctgtattacttcattaattttactcagcagtaccaaagggttttaggaagttgagcaagaagaccccctggtcatttggggacagacatttaacaataaattgagcctgaatcttatagtccccaaacctgacttcctgagtgaccaagcagagatggaatttaaggaacaagcatcttccctgtaagtcccatcattgtgttcaccacaaattacaaatacttatatatgaaatatgcatctagaggcgttaccagtggcaactccatatgggtctgggtctgtagcaactctattcttgccttctttgaggaaagaatttggctgagggacagaaggcagagtgagagactgaggcaagttttagagcaggagtgtaagtttattaaaaagttttagagcaggagcaaaaggaagtaaataaagtacacttggaagaggggcaagcgggtgccttgcgagatccaagtgccccatctgacccttgacttgggtctttaatatattggtatgttccaaggtttgggtttcttctcccctgatttttccttgtggcaggctgtccgcacgcacagtggcctgccagcgtgtcggaggtgctgcatgctcagtgtgtttactgaagttgtgcccatgatcacttgaggcatttttcccttaccagtcgagtgctgcaagaagaaggtcataaaccagttaaactctgccattttgcctgttactgcacatgcttgagctccacttacccagctcctgcgatctcatcaggaagctgctcatcaccagcttcaggtgtttcccatctattgggagactgcctttccctggcaccagctgcaaccaattattattttagagcaagtttgacatctgcccaaccgtctgctaatggtcacctgacatttctgggagtgatgctctcttgccctgctcatgtatgcctagatacctactctaacagaggtattcagttccgtaaaataatagatttgttgtcattgtcagtagccatcagttatgttttatatttccaagcagtttttaacttcatcacatctcttaagagcaacagccgtatgtaacttttattattaataacccagtgatgttagtataagtaataatctccttaattaccacattccaaaaaaatgtctcggggttgttaatggcttatctaacatctcacagttaatatcacttattctcttgaatgcaagtctgtgcttttgtcaccacattgcagtggggcaggagaaatatctggcatctactaggaacttagttgacatcagctttctctttctaattctctcttccctataattaaattatcttatcatcttgcaactttgtgagatgattgcgtattttaatctccgttttgatgaataagaaagcctttgtaatggatctcaagaagaggaatttaaatccaacaaacaaagagaaaatagtgcactgaatatttgcattgggttttatatgttccaggtcacatttcaaagttgcctttctgttagacttcatagttgtcagggctactaggaaacaagttccttgacggctcttttagaattatttgcactcagaattctttggttctattccagttatttactgttgcacaacaaatctatgtctaaggttagtagcataaaaccacaggattgcattctatatcatagttttcttgggttagaaatttgaataaggagattattgtcttccactggatattaacggagattgcttgatagtgttcagttgcaaacgtgctggtctggaaagcccaagaaggcctcttggtgccttggaaaggataggaccctcgagtagatggtgcctggatgagatggctgggagcctgggttcaccggggactgttgaccaaatgacacatgtggcctttgtgatatgatgatttcaaagtggttggatttcttacatggtatctcagggctcccatagagcgttttccaagagacaggaaacaggtagtgtagcaaaattagtaacaccacttccactatattctactgatcaaatagtcacatgcctgttcagattcagaggaaagaaggaaagaggtatagacacaacctctcagggagaaaaacatcaccaaatttgtggccatctttaatattcacatttcatgtagttctactctatgaggataagcatgctggtatctgatctggtcacagtctgaactgtacagcaaaggatgagggtagtgaaatgtggagtgatgagcattagaagatgctttttgcctctgaggaggatttccctaggcaaaaagtggaaagtagttaaaattgatctttgctgttctgtttgctattaatcttgaggtgaaggttctggcaaacatgttgaataactgaattctgctctagcaaacaacgcccgccatccccatatctactaagtttcctaagaccatgtttcccaaactgctgcaattctgtatcatgttgaccatttttaccatatcagggtccttcttgaagtattgtttaacttctttttctaacttaatttactccattttatttaagttttaagatacatttttcatcactcttataaatggaaagccattatcacttgtcataagtagagatacttctgaaaataaaaccattatctacagcagaggtgagcaaacgtagtggtcattggctaaatccagactttggcttgtttttgcacaatctgcaagcaataaaataaagaagggagggatggattatggacaagaaggagagaaacacagagggagaaaggaaagaggaggaaaggaagttgggaagaagggaaaaatggaggaagaaagaaagaagaatgtagcaaagaccatacatggcctgcgaaagctaaaatatttactgtctgtctcttcacagaaaaagtttgatgaccctttctctagagctatgcttttcttcttgcttgtccttccaatgcaatattatgtgcttgtgtttgctgcctgcttagaaagctgcatttgatgctgtgtggtgaccaacaaatcaatcatgcctcctttccatggtctagagttgttgctgagcagcagctgtccaggcgagggattacaattctgagccatggcatctagtggagccatgagaatggttcttactaatggtacataaacaaaagtgatgggtgtcattttgggttccaggtggttaaatactggttgcatgatccttcacaatctctgtcctctcatgcctttgtctgccagttgaaagatgctttgtttaaggaaataagatattttgcaatttacactatgggatctgatgaacagttgtcagccttaaaaacacatacccattaatttttattgtgtcccattggccataattataccaaaaatacatatgctggcgaagttatagtagcaataaccttattacagggtaactattatgtgggcctgtatgtgacagaaattggtagttaagaaataatactgattttcaggctatgagggcaaaatattgcttgtcaaattcattcagggatattttctgagtcccaaaagtagatgtgagctaagaagtaaattaatcagtttaggatttctattaactgagattccaaaggtcttaatattaacaaattacaatgattaactcagacataatttcagttgcaggcatgggtaatccagataatggcatgttgaagacatataatagaataaaacccatgcagtactaaaaaataaataaatacataaaagtaggttttatttagtcaatttatcaaggttactatttgttgttgctaattgcagtacttttcatgtgcaaaacactgcagtttcttaaatgtgatgtcaattagcctcacattgaataaaaaaggtaaataagttttatcaagttttcttcctcctctttcccttccttcctttcttttttcctttttcctcaaagaaacaaagataccatacagtaaagtagcttgtccacagttatgtgagcttttctataatccattggtatcttccctaccatttccattttctcctcaagcagtaagccctttaattcatttttagtttatatttctagtttagtgattttttttaacataagcaaatacatatgtggacatctatctatctatccacgtcgccacttcctcacacaaaaggcagcaccctatacatagttctacactggtttttttgcttattttctatttaacgtatatcctggaaattgccatagcaatgtataaagatacctttaagctttcttacaatcacataataatccaatgtgaggatataatatagtttatgtaacttgtcctttttgatatgtatttggaggtgtttctagtcatttgttcttaaaaataatatcaaaggccaggtgtggtggctcacgcctgtaatcccagcactttgggaggccgaggcaggtggatcacctgaggtcaggagttcaagaccagcctgatcaacatggcgaaaccccgtctctactaaaaaaaatacaaaaattagtggagtatggtattgcatgcctgtaatcccaactactaggaggggctgaggcaggagaattgtttgaactcaggaggtggaggttgcaatgagctgagatcgtgccattgcactccagcctgggcaacagagcgagactctatctcgataataataatgataatatcaaaaaactgagaaaatatgacagcaaatattcttagaaaaacttagaatgtatgataaaataccattgtcatacattctctcatatttggctacatactttggaaaagattctgagatgtaggattactgggtcaaaaagcaaatgcatgtacaattttgttgaaaaaatgccttattacactctctatgatgtttcttctgtatttcattcccaacagtaatggaagaaaatgcctgttttcccacaggctcaccttctttcccaagacaggattttggctgttttcttctgggaataaaatacttctcagtgtgatgctttttgttttgtttttgtttttgttttttttccattttacttgtttgccaatcctattatttatgcaaaaactacacaactttttttaagtttatattcccactaatcatagtagcattatattcttacttgagttttcattgcactgttctcataaggaacttgagtatcttttcatatgtttaaaacttttttcattttttattttaaaatttttgactgacaaattaaaactgcatgtattctaagtatatatgtgatgatttgatatacatatgtaatgtgcagtgattagcacaatcaaattcacacattcactagcagccatgctgcacattagacctccaggacttgttttataactgaaagtttataacctttgaccaacattgtccttttttcttttcttttttttctctttctttttttttttttttttttttcttttgagacggattctcactaagtcgctcaggctggagtccagtggcacgatcttggctcactgcaagctccgcctcccgggttcacgccattctcctgcctcagcttcccgagtagctgggacaacaggctcccgcgaccacgcccagctaatttttttgtatgtttagtagagactgggtttcaccacgttagccagggtggtctcgatctcctgacctcatgatccgcccgcctcggcctcccaaagtgaacattgtcctttttcctactccttagcctctggtaaacaccattctactctctgcttctatgaatttgaacttttaagattccacatgtaagtgagattatacagtatttgtctttttgtgtcaggcttatttcatttaacgtaatatcctccagttcatcaatgttgtcaaaataaaatcggtatcttgaagatacacttcgtgcacccccatgttctttgcaatctcatatttattgcagcattgttaataatagccaagatatagaaacaagattagtgtccactgatggatgaatagctaaacaaaatgtagtctatgtatatacaatggaaaattattcagccatagaaaagaatgaaatcctgccacttgtgacatatttgaagacattttaatgtctttccataaagtgtttgatcacatgttgtgtccatttttctttcagcttgctagttttattcttcaacattctttgaagctttaaatattaggcatactaagtttttatcagtgatagaatttacagtatctgagatataatttacaattaatctaagatccaagtaacaattattacaattattactctaagatccaaaacacaaatatttattgtagttggtcatattttgcttaggtatttttggcatgtaaactattatactttttaaaaacttatgtaaaaaatctattgaccttttccataatgcttttggaaaaggaatatatcatctctaggtaggtgtataaagaaaataaactgttctctttaatacttgaataatttctgcttatttgcatctcttacccattgggtatttgttgtggtatctgtgtgtaagaaatatttacaggctttttaaaacttttatgtttggtgatctagttcctcatatgccatgtatttaaaagttaatcttttcattaatgacttggaaaagcatattttcatttattcatatagcatatctttccttttagtgtttctctcagtttcaaaaatcattcagtctattcattaaccaatatttatttaataaaatttgtaatacagaggcttcataacggcttcaatatatgatggagttggcttaccctaccatcatgaagaggatacctgtggaaccttcctaagaaacagacattgatcttccaaagcaggtgaagctcaaatacagcaagagtcgcacatagctgcatacctggggcatgccacatggaatcatgtgttgcacacacaggaaacaaagggtgtttttaaatgtcagtcccacatcaaaagatgcaaaggcaaatgcttttagtagcagaatttgatttgtaattgagctttttctcccaaacacaattctttttgtttggggtggggaatgaatttcagcaactccatatatgtttgttgaacaaatgaatgaattaaagaatgaactccatgaactaaaggcaggaatttccatgctcaagtttgtaaaatattcttctatacaattatagttagggcaaataacaatacaaaaatatattcaggtatgcctagaccataagaatggctcagactggattgtactggaaaaatgtatggatctgattattgaataaaataaattattacttgtaaaacgaaaaattggaaaagagccttagcagttgaatataaaatattaaagagtattaaaaatgacataggcattcattcacttgaccagtgttcgttttatgcctactacatagctagcaaaaatctatgatgaattactaaagtgaacagtgtttgtacacttaagataaagcatttagtaaccacgaaactcctgcttgaagtccttaaaaccatgaaatgtcaaaccaaacccagattctcagttgacagattgttgtattaatccattcaccaaaatgcaaatattaatagagaatgcatttttattttatcaatacatgctttaatgttgtctgaaatgtttggggaataaagaagagaagtaatggctttaaaagagttaagttcatgtttacccaggtggacaatcacagtctaaatgctgattaaaattttaggtcaacttggagggaaagaacctgagatcactcacagaattctgctcaagtgccttcctactttccgtcaataacttcaattgatgtagagaggattttttacaaatataacttatgaacaatttaaatctggaagagcaagcaattatggtgaattctagaatcaatgctcagaatcaaaaggctgaaatgacacatcaaagctagcaaaatgaaatcaactggaatctaacaggttgacattccatgttttaaaaacataattataaaggtaattgtgcaagaagtcatggaataccaaagctcagaaacaaaagtttaaacaaaactttaacttgagttgacattaaaatttaaagtataagtaatatcctaagactggcattcataattgtgcagatattttccagtattacaatggatagtttctgccaaataactcatctaacagacagtcatgcatatcggtatctatactttcagatacacattttttcagcaaaccaggtactgtaaagtataaggccctataatgttcttttcattatctaaccctctaacactttgaagcacattaattctttttatctccctgctttttgtttccctctcattctgacttacattggttagccaaaggagcagcagagtattgcagtctgagattaaagtgaacctgctttccttttcttttttttttttcccccatatggtatttgttttctttattattattattattattattattatactttaagttctagggtacatgtgcacaacgtgcaggttagttacatatgtatacatgtgccatgttggtgtgccgcacctgttaactcgtcatttacattaggtatatctcctaatgctatccctcccccttacccccacctcacgacaggctccagtgtttgatgttccccaccctgtgtccaagtgttctcattgttcaagtcccacctatgagtgagaacatgcggtgtttggttttctgtccttgcgatagtttgctgagaatgatggtttccagcttcatccatgtccctacaaaggacatgaactcatccttttttatagctgcgtagtattccatggtgtatatgtgccacattttcttaatccagtctatcattgatggacatttgggttggttccaagtctttgctattgcaaatagtgccacaataaacatacgtgtgaatgtgtctttatagcagcatgatttacagtcctttgggtatatacccagtaatgggatggttgggtcaaatggtatttctagttctagatccttgaggaatcgccacactgtcttccgcaatggttgaattagtttaaagtcccaccagcagtgtaaaagtgttcctatttctccacatcctctccagcacctgctgtttcctgactttttaatgatcgccattctaactggtgtgagatggtatctcattgtggttttgatttgcatttctctgatggccagtgatgatgagtattgtttcatgtgtctgttggctgcataaatgtcttcttttgagaattgtctgttcatatcctttgcccacttcttgatggggttgattttttcttgtttaagttctttgtagattctggatattagccctttgtcagatgggtggattgtaaaaattttctcccattctgtaggttgcctgttcactctgatggtagtttcttttgctgtgcaaaagctctttagtttaattagatcccatttgtcaattctggcttttgttgtcattgcttttggtgttttagtcatgaagtccttgcctatgcctatgtcctgaatggtactgcctaggttttcttctagagtttttatggttttaggtctaacatataagtgtttaatccatcttgaattaatttttgtaaggtgtaagggagggatccagtttcagctgtctacatatggctagccagttttcccagcaccatttattaaatagggaattctttcctcatttcttgtttttgtcaggtttttcaaagatcagatggttgtagatgtgtggtattatttctgcagactctgttctgttgcattggtctatatctctgttttggtaccagtaccgtgctgttttggttactgtagccttgtagtatagtttgaagtcaggtagtgtgatgcctccagctttgttcttttggcttaggattgtcttggcaatgtggactcttttttggttccatatgaactttaaagtagttttttccaattctgtgaagaaagtcattggtagcttgatggggatggcattgaatctataaattatcttgggcagtatggccattttcacgatattaattcttcctatccatgagcatagaacattcttccatttgtttgtgttctgttttattttgttgagcagtggtttgtagttctccttgaagaggtccttcacatcccttgtaagttggattcctatcctatcctattttattctctttgaagcaattgtgaatgggagttcactcatgatttggctctctgtttgtctgttattgctttccttttcattcctgacaggcaaggtgagcgccctgaacaacacagctcccctgatcttttccccctacctactaaagggggttgtcctcctaaaggggcactgaaaaatcactgacatgaggcagattgattgataggagaaaagatgtacaaatttatttaatgtgtacacgtgagagccttcagaataaagacccaagctaacaataagatacagaagcttttatattaatatcatcttagttgatagaaataatgtggactcagagcatgccccacaacaggttttagttgtaaggcaggttataagagagagaaaggaagaggcttgactggcgagggtggtcttgttaggtaaatgaagcttccctcagagaaaatagatggtaaatgtttccttttagacttttaaaggtgtcagcctctcaatctctcttagttctaggaaaggcatacaaaaggccttagtaagctgagcgtggtggctcatgcctgtaatcctagcactttgggaggccaaggcctagcactttgatcatgaggtcaagagatcaagaccatcctggccaacatggtgaaaccccgtctctgctaaaaaaaaacaaaaaaaacaaaaaaaaaacaaaaattagctgggcgtggtggcttgtgcctgtagtcccagctactagcgaggctgaggccagagaatcgcttgaacccaggaggcagaggttgcagtgagtcgagattgtgccactgcactccagcctggtgacagagtgacactcggtctcaaaaacaaaaaaagaaagaaagaaaaaagaaagaaaggaaaaaaactgaaaagtcctgggtatattaatggaaattctctacagaggcaaaatttttccccaaaaaagatacctttgcaaggccacttctgtttgctggcactgcagcaggcattttataatatgtgaaataaatatatttttggataaaatatatttatgtcttttggtacctactttgaaacttaaaacaatttttacacattaaaagccaagctgattgctttggtagaatttgtgttaagggttgttagttagagatagccaaaaaagtagaaagataaattggtatatacagaaaagaacaaatttaaacatattgtttaaatcttctttagtctgttagtcatgaaaatatatcagttcagttaaacaattgtgtctcattccaagaggtggcattgcagatgggctttgcctttacgtgtgatgcaggcaaccagctctctaataaagcatttctatggaaacagaaggaaaacaaaggttgatgcgtggcacggtgcctctatagactagcttttctagagtttctagggcatcctcagattgcaagggcaacctgacagattcttctggattgtaatttggaccaagagttcaagtgaactttctgagaaatccacacatcagcagggaggcatgaaggttgttcatatataagttgctattatttttttactgacgtttaagttgtctagcttcaatttgcagggctttaagaaaagcacagttttaatttctaataattccaagccagaaaaatggaagaaaaaatgggaaataaaaaaatgttagtttggagacttgtaacaagtaaagaattcagaattcagactaaaatgtagagaaaaaatgaaaactcaaaactaatggacaaggctagaatctaataataggtatatgactgtctcttttgaaacataatttttctctctctattcccccattttttaccaaagacaaatcatagcaggaccaatttatttgcaacacaagttttagtcttattatacttggcttgattaattgcttaaagttcaacaggaatcattgttcatataggcttttagacgttggctttgctggaacttttttcataaggaatctcagattggacttttaaaaacctttcaagcccagccaataacttacctctgcctgcagatacctattatgaagtgggtaaattcctctcttcttgaagtcctcaaaaaacttgagattcttaggcctgtcagaaagtggcattctttacttaccataggtcaggaaccctgcaaagtaaccatgtagacaagagaccagtcattccaaggggctattattggctctataaaatcaatcttaattcctcaaagcattctggtcatatctaaagatatgcccttccagctgaagccatgctaaattaaccactatctctatttatgtcctgttaaaaatgaaacagattcttactcaacttacacaaataactatattgccatgaattaagaatacttacaaataatttccaaattctggagaaatcagacagaaagaaatatgcttctaagtttgtttacaagagtatatttactcagttgttaaaagctataaatagctcaaaagaaaaaagttttcttgactctgaaaaacaaaacataaagaatcagcaatgttttaaacaaaaaaagtcataaaaaattatttcagtatctaatagtccagtcccatgcaattaactcctgttcttcccgatattacactaacaatcctcattaacactttagctctccagtgaaagttctggaagttttttctctagtccaatggcacaatctccaaaattaacagaaacctgctttcaagcatgcctatccaggtcctttctatgaactccccataagaagcaagttttgtactctagctgatgataaaccactttttgaggagaatcaaagcaaaacaactgtggatgacaaaagtcttagcacagccatggtgaaagacacaattgacaaggaaatttggttacttctgtggcatacaaaaatttatcataatagatataattattactgacaacatactgagacatatcagaattatagaaatcccatactattttggaacacacactaataacacatttatataaatataacccaaataaagttaaacattattttatatttcacaatgctttctatatgattttaacataccaaataagctgaatatgtctttcaggggacctaatatctaaaaagctaatgaggtcaaaaagacagaatttgaaatttgattttggaaagtttgtcaaatatgtaagattttaaacatctgatgtcaaaaattaggcaaatattttagaaagcaaaaacatttatgctttgagaggagactcagtttcttaaacaataaggcataataaagatacgaagacaactgaatctgtctttctcttccctttttttgcagtttactcaacaggttaaaaaaaatctgttactatctcttactattaactgaaaactttatccaaaagagaaaacaaaattttacttttcaatagcatattattaatgctaaagcttatttcaatgaaatcttatgaacaaactcatccaatctcaaacagtttgaccataaagtaagatttttatagacccttttataaaccttaataattttctattaaagagcagatcaatgttccaagaaaaccattactgcaacacaaaggccctgattctggccctgtgtcagtgtgcttttgatattaatgtttaatttatagaaaaaatgaaataattccctttaaattttagccaacttgatcacaaacaaaattccttttttaacattaatctgccataaaccttctataacttacttaaaccttcagtttttttctaatattttactttaggacaaatatttcctttcctccccaattttctatatccgtttagttttatccatcatttttttctttaatttaaaacaattcttataaacctttaaatgagtcagaattactttttctttaacaaaaaccacatttccatgttttttataacctttttacacgtcctactttattatatgctttgtatatagaattgtttcttttatatctagtagttttaattttatttattacagtgttgactgtaactcttgtttttagtggaaaacctaggaggtaagcaattttaattatgtattagattcagagcccagaacaaaggacagagctgcagataatgccttaccctttcctgcatagccaggaggcatagctaggccaagaagaactcatgtctatttgtttagagcctagaatctaatagttgtaaaacaggcaagtcaaatatttgtcaaaaatatcacacataaatatcacaatttatgaccttaaaacacctagcaaaggcagtatctgacctgcctgtgtaattcagactgaatttctaaattaaagtctgaagatgtttccattttatcttaccagtaactttcaaaaactcttaatttaccaaagattagtcacatgaactatgaaactatgtgaggtaaaatttttatttttctgtttaaatatttgatttaagtattttttttccttaagacaagtaattagagctcttttacatattttagtaatgaaacatcatatgtgcttataaatgtgtataaacacacagacatacaggcagagaaacaaatcttcacttgtcatatttcaaagtttctctccagtattttagactatcagtctcttgattacctgttttcttctctaagcaattattagctaggcaaccccaaatgtgcaattctaaagggacagctcttgtaaaacaaagtagaaaatttatatcttagagtacaaaggtaaaacatttggcctaaatattgtatcatcatctgctcaaaccacgggaaaaaattatgtgagtaaaattcagttaagatgaccagagaaagcaccttaaacaaagagatgacttgtaaattttaaacaatggtaaacacttttaatgtacacaggtaggcaccctttcaaatggagatttccttaaatatgtaaatttcttttacaaaagagtgtcaggatagctagctaaatgctagaaagttgtattttggctattttacttaactcgtttcataattagatgactagcttcagagtggagccccttggtgaatatgggaagaaaagcatacagtttttagggcttactatttaactacatgagaagcaggcacagctggaagtaaaacgcatatccctcagaatcaaggatcccatttgcacattgaatcctgggtcccccaaaagagacaaacacaacaggaggagacagtgcaatgtttccacagtatacttcactgtgaggacattccctggaggctgctaggcaacccaacaccagtcagcacactctataatcagcccattccctagacattaaacacaccaaggtcaagttttttcacaatacaaagtaatttctcatgtccttcaaagccaaagagatcaggtaaggcaatgcaaaagagactgaatatgacaaagaggaaagaagaataaggtggattaaaaataaataagagaacaatttttaagaaaggaagcaaacgtaagtaccatgtacataatttagaaaaaagttttagccaactaaaaatattccgcaaaacaggatccaaaaagagaaaaaacataaaggtcatatatacatatatatacacacacatttatatacattatatattaatatatattttatatgcattatatatatttcatttacatatataaataaaatgtgtgtgtgtagcttagatatcagcttttaattaagcagatttctaactgtagtgctcactcctcaaaaataaaaaaactttcaaaatcttattactggatttcagctgggacaaatagcttgtcttggcttttgaactcctttaccaaaggtctaaagcagtcctcataagatctagaaatatcaaatcaaaagagactaagtgattccttcatcagaccaactcttctgtcaatggttgagagaaagtgttactctcaaactatgattgtaaagttgtctatttctcccttgaaatctttcagatttttgaaaattctaaacttcagttattaggtatataaacatgtatgattgttgtgacttcctctcccttttatcattatgaaatatgtctctatgtttggtaatactaattattttgaagtctattttatttgatattattattgctacttcagccttctgacacttgtagatctttttccatccttttactctcaatttctctgtgtctttgtatttaaatctttcccttttggatagcatatattggggtcttatgggccttttttttaatatttgaacataatctttgccttttaacttgagtgcttagcccataaacatttactataagatacattcagatttagttctactattttattactggtttctatgatggtcatcttttattttctggtccttatgttggccatctttcattttttggtcctctgatctcccttccctgccttcttcttaattacttgaatatatttttagaattcaattatttctttactagctttttacctatacctctttgtatcattgttaagtggctgttctatggcttacaatttatatcctttataatgaacaatatataacagtatacttcaatttttgtagcattttgtgtaaaatatagaaaacttgcaatcatataacaggtcactatcctgtaattacagttgccatctgaattaatatacacacagattaaaaatccataaataattttataatatttgctttaaagggtaaattatattttgaagaaatttttaaaatagggcttttttatatttactcataatttaacatttttaatgcggtttgtttatgatgaaagattcaagcttttcatctggtataatttcctagtttctcttcagcctgaagagctttttttttttttcattaataacatgttttttggagtgtaggtttgatagaaataaatttccttagtttttcatttaaatatgtatttattcgatattaatttttgaaacacgtctcactcattttaaattatgagatgagaactttatttatttattttttacctctgtaaaggtttctttttcttccctgctctcttttgttcttcatgggtttctgatgggaagtctgtttttattccaattattacacctctaaaatcatatgttattttcactgagtagtttaaaattttctcatgcttttgactttgaacattttgagtatgattatctacaaaatatattctgaatttgtcttatttggcatttgctcaactattaaatttaacatcttgttcatttaccaaaaatggtagttatagtcattatttcttcaagcagctcttctgctccattttctttctctccccttctgggactcaattacctatatgttaaaacttttgacattgtctcatagacttcttaggccctgttaggttggttagaatttttaaaatctctctcatcttttggtttagtgaaatttattgacagattttcaagttcactggccattttctctttcatctcctttctcttattaagcttactcagtgattttatttcagatgtttatttatttcagttctaacatttcactttcttttttatattgtctgtatctttgctaagattttatactctaccttgaagaacaaagttataagaggtgctttactagcctcatacgataattctagcctctgcaccatcctgattggcatctgttcattattaatacctcgatattgggtcacatttgcagcctttctatattgagtaattttgaattgcatcctggatatcgtgagtgttagttatgctgaatatattctggattctgttctattttacctccaacagattattgaaggtgtttattttggcaggcaatttacttactgtcacacatatagtgcattgtagctcacatctcactttttttgtaatttttagttgtaagttgctttaattttgcccaccatcctccattcaccttatgaatggtcccagtagtcaaccaggaacttaccttgagtttatgcactgaattaagggttcctttttcctggtctctcctttctgtctttgactctttgggagccattgttaccccagagcgccggcacctgttttttttgtttgtttgtttgtttttgtttttttgatgagaagtcatttttaacctatctccactgcagcagcagctatcttaaggataaatcaccaataaaatagggattttacgctatgctgccccaagttttgattcccctttagaaactccctgcttgcttcatcctccaaagccctcagctagttgtgtttttgattttatccagcatttagttatttgtgtaaggattgtttttttaagagcttattcttcaatttcaaacacccaaacttcctgttcaataatttttgaaaacctaagatgataatgtaataactttctctcagatgaataagtattttaatagattttctaaaatccagtaaaacatactttggaaaaggacaataaaagtttttcttaaaatttttatttacatatcaacttaattaaacgtgttagctgatttccatgtatatatggaagatcagagaactaaattcttcaggtaatctatttttgcacatctttgggaaaaagatttctgtttgattgcctctaaagcgtagctcattcacatttaattatcttaagaataggccacttgtaacattaatccacaaagctgaatttataatttgtaagagatggcacctttgaagttgacatttcttttatatcaatgagattgcagctgcagatgaagtgcaaatggcaaattatgcaaaataaaataatcacgaggggaaacttcagttgaatatttctgtttgattaataatctatcagcagataccatctaatttaaatttgcacaaaagcataactgctgttgaaaaattgctgctgtttaacggggacaccaattcacatttctttccctcctcctctttgtgtagccaacgattgcagttacttggttttgaattgggctttttagagttaatgccttgaaaatagaaaaataataaaaagctttccttcatcctatttatgcctattcacctgcttatcatcttcaagtcttttctaggtcctatgagactagaatcattattcagttttgcccagttacctacttcttaaaagagaaatgtcattcagattctttaaactatagcagatagtcattgttctggtttgtcaaagaccaccttaaagtggtgactagaattgaaaagagaatttatttaagtaagcgtgatgaatctaacttttctcattatctggactataaaatgtcattaaggtttcctaagattcaattaggtttctttgttttttaaggggttggtttctttatgcgttttgtttctgtagcaaccctatcactcttgtaacagcacaacacaaacaccagttacccaagtataaaaacataattaaaagctatgcctttttcatatcagataatgccaagtctgggatatattacctgattctgtaacgtagataaataccttaaatgcattgttattaaaattgaccacagtgataaaatttgaccacttgacagaaattctaccctattaaagactaatctttagagagaaaagaaaaaaaatattacttgggttaatgagcttggatgtggatttagaaggtctaattcccaactagttgaataacaataattgtatcactttctttttttaaatggagacggagtctttctctgttgccggctggagtgcagtggcacgacctcagctcactgcaatctccgcctcccgggttcaagcgattcccctgcctcagcctcccaggtagctggtattgcaggtacgcacaaccatgcctggctattttttttttttttttgtactttaatagagacggggtttcaccatattagccaagatggtctcaatcttctgaccttgtgatccgcctgccttggcctcccaaagtgctggaattacaggtgtgagccaccgcgcccggccaattgtgtaactttcaacaactcatttgacctctaaaatttctgtttctttaattgtaaaactagatttttaaattaaatcacctgtatcttctcttttattctaaaaatggacattttcatgaataaaaccccacattgtaagcagaaacttaacagtctctaagtaaaattctgtttgtcaataggtctgagtactccaggcaatgatgactctcatgatcaccttcacctggatgtgtttccagagatcaaagaactatcagacacagtctctgtcctgaagaatctgattatctttatacaatgacagagttatacattgagaaacataatgaatggtttaaaaaaatgctagaacacatttccaaagtaaatgctcatttttagcacagaatcttttaaagaccttacaatcaaatttatatcacattagtccatttcaacgccatattttctatttatctttacttctgtgtcctataaaggaaatgatatcattcaacattcaaaagcatcttttaaaaaaattatttttttagtctttctatttgctctttggagtcatataaatttctttattttttcattcttctctttcatgtaaagttgctgattttataatactaagatttcataaaagaaaaagaccttcctctaaaacaaatgttctatgtgaggaaaaaaatacacctgtttgcaaggtgacatttctttgaggggtcactcatggcacagcctggggatacacagaccacgggccaacatctgtggggaactcagagctttgctaattgcattcatcatatttgctggggattcacttagtgctctgaaaaagccagataattactggttatttaaaaaattactttgaaagaaatacacataaagcatatccctctcttaattccttgaaataatttccaaaaattataattatttttaaataagttaaaagtaaatttaagggaactgaaaattattaaggttcttgattcttgatgcttattggcatgttaccttcagaaagttggtgcatttgccattctacctgacgttctacctgacatgtttaagggtcatagttctctttatccttgtcaacatgctgaatgttatcatttaaaaaataaataaaactgtgtgtgtgtgtgtgtgtgtgtgtgtgtgtgtgtgtgtgtgtgtgtatagtcatctgcaagttgaatgtgttctttggagaaaaaaggtctatgtttgagtcaaaaattccatcatcaagacacagcctgtggtctcatattttcttcagttggtgacaaggatctgtgaattgtgacttggaacaggtgggcgcacacccaccccccgccccgccacccccccagaaagaaacaaaacccaactctagtcttcatgacagtggcagtgaccaggaaaataggacagatctgttttctcagctttctctgcactccccagtgtctagagaggaaggtaagcaagggtgtaagctcaggccctggtgtaacgtttgtgcataacagagctgggctggaacttggcctctccactactgtgtgttttcgttgttgttgtttttttttttgttttttttttttttggatttcttgacagctctaaccacgtaaacctaatagcagagaaaaggagtaagtgtcagccctgccatgtacaacgctgacatagtttaaaagcaaacctttgttcaaaataaatcttaaccattttagagcactgctatttcttcactggaatttggatcagagaacaaatccagtccactgacaagatgtgagagaaacacaagagtttctttattctgtaagataaaatatttatgagatgatttttatcagaaggcacttattatgtagcaatctttacagactctatgcttgctgcagagttatctatgcaaaatttaaactaaaggaaacctaggtgtttacatcttaagaaagacatacatttcaaccaacagaacatgtgttatagagttgtgttttataaaggtagagtggtaaacataccttaggctaaaggaagaaaaatgatagggacatgctgcaagctgaataaacctcccttctagctgtttttttgttttttttttttaagatggtagcttttgagacagtgctatctttcaggatattcagattccctttcaaacaaatgaatattctgtgctctgattgcatgttttgttaagttgggtgatgacagtgggttcttagggttgtcctcctgagagagtagccccaactctatttttggagtttttctattctctagtctttgtatatgccacagacatttggtctctgagtcctcagtcttataacaatagatcttaagctttgttatctaaaaaactatccagcttctgatttaaaaccaagctgcctaactataattctcatatctgttatttcttctaagatctcagaggaatgctctcaacctggactattttagctcattcagtagaacataacagcagtctctgagcctgagctggttagccaccacagttctgttctgtcagggtaattgctatcatgattcacaactagtgtctcttttcttcaagaaactgtcactcaaatttaccctaccttcttcacctaaatccaattctttagatcataacctaaatctaagcctttttcatttcacaaccctacatctgcaaggttcttttaattattctctgtctttcaattttctaacatcgacagtatagccttgcatacttttcatgaggtcatttgctttttgaaaacataagtagccacctccttcttaccatactgcaaaaactcctgtgtaagactgtttaggtcatttaaagtctgcacatctccaatttcttctcttgtacttaccacaagaatttaagaaaacattaattaccgaatgatttatgatattttcagttgcattttactctaatttgatatatctttataagccattgctaatttgttataacttactgcataaagagagtttgatagagggtttcatgatctctcaacaaaatacgaagataggtagatgatagtaaagttacagagaaaacaatctccaatattcacctgctctataggactaggtcatggaatacttttacaaaataaagaaatttggagattgtcttttttggcaaataatgattaacatgcatttttttggatagaatcaatttttgggatgtcacaagggttatataatttaatgctgataagaaacataatagtatcactgtttctctcattttgaaaatgagaagactgtgagctagagagaatacatatatcataatttttctaagatgaacaaaaagatcaaaactttaaactcttatcaccccaggctatctctgtaaatgatctttttaatttattaccttcttttggtatatatttccccagttttgtatgatttgcagctttttaaaatattctgattctttccattctaagcaaagaagaagtgcatttttctccagaatgtaagggaagtactcggcatttgatcttaatttcgctttttttacagtgtagaatgaactacagataagaggggtggaaagaaagaaaagggagagaaagccaacatgagcaaatttctattaattgtcagatcatgacacattccagccaagaatgttcctatcttcttatcaacaaaagtaaaatttactctctctctctcttttttttctcttgtaaaaatagaaacttctgacttgccttttaagctcaaaatcaaacatttctggagcacctagtatgtgagaggatcattttctctatcaaacatcttcccaacaatattatgaatgcaaagtattatgcagaattgtcaaataaactttaacaagttatgtatctgatccagattcacaaagaaatccaaactccaagttatcatgacttcaaacttctatgcctttgatattttatgtatcactagatgatattgtgtctttcaaattcctaatgtagaattgttggtaaaatgaagctctctagccaaatttaaattgacctacgagttaataaaaatgtgctaatttctaatgcaaaatcttatttagcatttttaataactaaaacattcctattgatatttgctcacaaaattattttattgtctaaaaataaattgctcagtaatgtttgtttttaagcattgataataatttgaggtggagtcttaattcttgagagaaaaacctgttcttaaaatcctgcagggcaaactcaagcattagacctttatttctcaatatgttctttcgctttttttaaatgaaattgccaaaaaaagaatagattcaaatttaaactaaaagtctagaagctaaaaccaagctaaacaaaataacactacattaaaaatataagtagatgaaaatgtgctatattttcttgtccacttcatcctgtgtaacttgtcactgagcacccattaatttcttttaaattgtttccttcactttcctcttgagagctggagtgttgaatctagcagcagatcacagctacttataaacacttggctgaaggactctcaaattctctgcaagattttgagtaaagtgaacctaggaattctgaagggacaccctttagtcagtaaggaaagagcgttcatctattccttagacttgttgctgctatcacagaagtcaaagttaaaaacacagggtatgaataccagtactaatttcctggactgattatcaaggagctgtcctctttcatggtcagaggctaatataagcactcctacaacaaaagcaggaagctttgtttctattttcttacccataacaatctttgtcctttattgatatgggagataaaaagtggtgacaatatcagacaaaaggaaagaaaagaatgcgagctttcatttttcctctcctgccttgatgagaagcagtcaaatgcaaccaaatgcccttggccatgtgaggttgggatagctcttaattagtctgcaactccaaactatcaaaaggtagggaaggcaaggatcctaggaagaaaaaccaaatactcacagacaattaaaaactaaagcctaatagttgattaatgaaatgatgtcagcctgcatgaagtgcccttatgactttgtacgaatcccttacgctgtcttaataacttggatactgatgtcaaagaaggtgtgcttatcatttttggcaaaggcataactatgagagacagagttaatatatttgaaaaaataatgcaaatttaattcaaacatttaataataatataagaaattagatgttttctcacaagataaatttaacatagatagggataaaagcccacatttagtaaaagggaacatatgaaagcacacatatttacacagatatatagggagagatgctacttaacaactgtttatgtacaaaaaatacatgagcgttttagttatttttagcacaacacgagtcaatagcattatgtggctactgaaagcattctcctataatttcagttagcacttttagaaattgtgctaaagtaaaacaagaaaattgttctattgcattctttgtcatatcctttagcatttattataactcagtatcattaattcattttttacttatttaatgtgaatctgttccattagattgtatgcttcatatcacacttgttttattcactaatccttgttcaacctatgcctactacagtacatggtccaagatgtatgtccttggtgtcttatatatagtatatgaggaaaatttggtggggtaatgtaaaggaagtagacgcctgggtggaaacgacatacattatatcccaggaaacaggcccagaatcaatatgtagaaaccagagaatgattaacttaaagtcttaaagattaattttagaatacttagaatatcatatgttgtaactattctaaagtttataagtagtccaaaatggagtagactagacttctgtttaaacatggtggaataataatacttttctttctatggcctaagagacaccaagtcagctgagggcacaagcactaacaaaacaggaagacagtgatgattaaatccttattctggctgggcgcaatggctcctgcctgtaatctgagcactttgagaggcagaggcgggcagatcacttgaggtcaggagtttaagagcagtctggccaacatggtaaaaccccatctctactaaaaatacaaaaatattagacaggcatggtggtgtgggcctataatcccagctattcaggaggcggaggcgtgagaattgcttgtatctgggaagcagaagctgtagtgagccaagattgcattgctatactccaccctgggcaacagaacaagacaccgtctcaaacaacaacaataataacaataacaacaaaaaacagacaaaaaaataccctgcctgccaaacgtactctgtcatgaagaaaattggaaggcttttatccaaaagtgggacaaaccaagagaaaagatgcgacattgccatgtagttgttccaaataaaatggggacaattatttggaacaactaatgttgttctggtcactctacagcaaggatcatcattcctcaaactatgtgataagaagttccaacaagcctttagcatctctttcttaaatattaatggatattcagtgatgatcagatatgtgagcagagcttctaacatgaaaggaacaatagtaagaaaactaaagaaatagaacatgaaagtggggagtataagaagaaaaatattaatatccaaaatgaaattttaaaaattcttttgttaatgacaagatgatatcaaaaggaacatagaatccatataaattatgttagacaaagttgaagacattgaaaaagaacaagaaaacttaggcatataatataaaaggagaaatataaaacaaataaaagatcaattcataaagatcaagacaaattccaggaagaaagaaccgagaaaatgggaaagaaacaatctatgaacaatagatggagaaaaagaaaatgatttctgctagggcacatcattatgaaattcccaaatgtagaaaataaactattccaaagaagaaacagcagatttgaaaacagaggatggaatctcagaaagggtcttcataatggcagtattagacattagaagacattaaataagcatcttcaaaatactgaggcaaaataattagcaagctagtgatccatatctggccagcagagcttattagaatgaagacatcttcagacacacaagatctcaaaacaataactttctcaggaaactactagacaatatgttgcgggaaaaaaaaggatgaaaatcacaaagaaagttgatatgagattgatgtctaggaatcagaggatccatcacaggagagatgaaaaaagagtcatcaggaagatagtgaagggatattccaggattccattttttagcagtcccagagagtaactaacccagataaaaagaagagaatcgtaagctctcacagtgaagtgttcaagctaaaaataagtgtaaataaataaataaatacctctcttctcccccaccaaaaacaaaaaaaacaaaaaaactctgctaaaataccagaccctactgtgacatttccattctactagtagagtttggggataaattcgttgtcattacagagaatagtaagaaaaaatttcaggaagaatgagtcattaaccttagtgaaaccaatattgtatcaagtaaaacaatgtaattaatggttcagctgtgaataatatttataaggtcatgaatagtgaaacgactgaaaactgattaattttaaaaactgaaatatgccatattgaatggttggaatgaatagttaagagctacaccatcatttccattaatcagaaattaatacagaatatctaaaattacaaaatcaagaaatgatgtacaacagttatcaattgcagaatattcaaacgttttgtagcttaaaacattaagtatttattatcttacatagtttctgtggtcaaaaacatggtactggcttcagtgtgtgaactgaatctctcataaggttaaggttaggatgccagccaagcctgcagtcagtaaggcttgactggtactcaaggatctgtttacaaagtgactcagtcacatggatggcaagcacatactactgttggcatgaggcctcagttcccctcacccccccatggacctcacctgcataagactcaagatatggcggctgcatttccccagagtaaatgattcaagaaagggcctgtaatagggaaatgtcttctatgactagtcttagagggtacaagttgttatattcacagtatactattagttactgagatcaaccctattcatcatgggagaggacttcatgtgggtaacttaccatggggaacagaggatgatatgggccagcttgaaggctatgatgtaccacaagcagtatgagtgtgtgtgtgtgtgtgtgtgtgtgtgtgtatgttttcaacatgaagtgaattttaaaacgatttgcattacaaacataaaagagctacatgggcagagatcctagtacttttaaaagaactgttttataattatccatgtgaatgaaactacaggtctgggaccttcttttcctgaaatgcttgtatatattgggcagcttaatttgtttactttgttattattgtaagagatcttgagtaacctgacaataagctatatgtgctctttaaattctatatatctgctctccagtaccactaccttggtgcaggcagaagtgagtacttggaattggctttttgtattattattttgaaaagaaagaaaaagaaaatcagtaaacaatagtgtccaaaatgaatatctttagaaataacccttcttagtagaccattgatattcttcggcatttcaggaaattaatccacccacttgataatggttgaaaattggtatcttaagacacagttgtttgtcccaacatatcgatattatatcagactgatgtagcttgcattctcccagtaaaaaggaaatagaattttaataaaagccagattgcgcaactaatactctggaattgtagtgcatttttaaaaatcttcatgcaggaaatgaaagagaaaaaaagaatccagatcctaacttttcagtagaagagtgaaatgtaaaatgattatagaaaatagattattttcaaatttgtattctgcacttttgaagaagagcgtattttcctcctggatacataatttggaaacatatttcaaaaaccgaatcttaatctatgcaatgaacatatcaaaaagtaaattactatcttcaagggaatgaaatatcatattagagaagcacactctagcaccacagtaattatggctttgccaacatttctgtgcaaagtctgattctgaaacatttttttcttaccccacacagccttgtttatgtcagaatttagtgtttaccccaaccttcaaatacaagttgacctattgttttacttctttaaatgaaactttttgggactatatgactttctaacttcctccagaaatatgtatggttctggatttcctccgtgcttcatctactgtagcttacagaagagaatgttatagaattattgcattttagaatcgaactttgaagcatgttactgaagccatatcatgatgggggagcagtccagaaatatttttaaagcactagtcttggagtcagaagctctgtgttagcctacctacttattagtagggttgccttgatgaagtcacttgattttctgaaatatttctctctctctctctcaaaaatctgtaaaatggaagcaacaaactcaatggcttttaagatctttgtaacctccaatgttactcaagtttgaatagagagagaaggtgagaaacaaatctagaatacacatctcctaactcccagtttggcatattcacaaatattagatttatgatgattagtgagaaaatataactattccaaatacatttctaggtatgtgagatatattacaatatggaaggaaaatgataccaaattgtggctcttctctatggccctcatcagggaactattctgaaataataggacatgtgtctaaccaaatccatatttttatatgctcatcagcttctaactatgtacttgacttgatctattcttaatgtcaccaaattaacatcttgaggaagcatgaaattttccaaaaagaatctatgagcatttggtggctatttgccagaaatatttctcctggacaaaagatggaaagccattctggaaagcaagagtgttttattagaatacagcagtgctttagtttaatgtgatcattacccttgtaagtttctaatcaactatttgcaggatggttttacaaatatggtttgactaacctcaagccttattttttgcatgcgaaatctactaaaaaatgcaacattatcattatttcatttacatatttcttccacatgtataacaaagtagaatgtatctccctcgttcttaccaaaaacctctaatatagtgacgtgttctgccaaaatgtaataaatgagaaagcatatgctttgcaggcagacatactgggtatttggaatctcatttctgcacttcttagctattatgttcctgggcaagatatttaatgtctctgagcctcagttccttcctctgtgaaatgagactaataatactgctctcataaagctgtattaatatatattctaactatatatgtgaaattacataaaattatgaaatagagagagtggtatatttagctccgttagatgcattaaaatgctaaacatctgtatcttttttttttttaaccagttttctttcaatcacgataaagtcatgacaactggtaactttaggaataatcttaccactaggcagggttgataaatcaattgtataaaatggtacataaatcaaagcctatgtttctctttttaatgtgtgtagccacaactactacatgaccttcatgctttactgctgagagaatacatatttagacaaaagctcaaggagttgcattctactacataacatgcagtggtttgtttctgtgactcgctgtggaagtgatttctaggagcgccagatgcttggatgctatttttatatagatagaaagggaatcccttcatttattggatgttcttggcatggtattgtgtgatttggtgcttgaccaggtgggagtctcttatttatgaagttcagaaaattccagtgcttagccaagtctctactgaatgcccaggatatacttgaaggttaacagtggcataaagtattagtgtttcctgatttttatatgtggatagaatatcttttggctcttggtttatacagattcttgcattattctctcatgagctcagttcttggccttaatgcccttgagttctttagggctacttcctccagcctttttgtctgacatcactactgcctctccacgatgtaaaatctgcactgtgattcaaagagatcccctgcatatagcagagtcattcttccaatggtttcctctttctttttcatttcaattcccacaagcctccatcttcagcaagtctgttgctgacaggttgaacaaatactgctaagatatatttattctctgagaccctttttcacttagagtaaatatgttactgtctcagttcatgttccagcaaaacgcagactctaaggtatggatttcagtacaaagagattacttggcaggtgatcttaagaaataccaatgagaaagtgggataaggaagaaaaggtacaataaaggatcctttgggaagcctgctagcactgtgggcaactgagattgaatcctttggggagcactggagaatacttaactgagagtgactcccatgcctctccacaggagggaaaatagtatactcagtccctgatttaaagctgatcccaaaggcattaattaccaataattctgtagactgctgatggagagatccaaaaaagctttggggcagagcaacacagctgttcagctggaattcagggcatgcactgaaatggtaagagacaatgggataggagcagataaccaaagtgtctaccataatcacctttaaaacatgctttatgcaattatagaattggaaattattttagagaccagctctcagcttatgagtcacaacaaggttattgataatatcgtaggtgggataattctttattgggcagagttagctccgtacattgcaggatctaccactaagcaccagtcagacacccagttattttgactgcacaaataaccatttatattttcaagtgcccctctgttggtcaacattttctctgagcaccacaattttataggggaaggaattttttttgtttttggtttttgggactgagtctcactttcttgcccaggctggagtgcaatggcgccatctcagctcactgcaacttccgcctcctgggttcaagcaactctcctgcctcagcctcccgagtagctggtattataggcatacgccaccacaccagctaatttttgtatttttagtagaaacgggttttcgttatgttggccaggctggtctgaaactcctgacctcaggtgatcctcccacctcggccaggcgtaagcaaccgtgccaggctagggggaggaattctaacttggcaaggctaagagacctgctaaaaggcaattggcaaccagtgtccacgtctccagaattatcatagagagaaaacagaaaccttctttttgagggagatcatctctgagatatttttacctgggtagcagtgaatcctggatacacagaaatataatataatatttgagtgaaataagtattaaattattatgggagctaaacaaattgccctcaattccctatctgtgcatttttatctgcttttaaataatataaattattattacctatgtccacatgcagaggcagaggaaaagagaatccctttaaaatgattacaagccaacaaaatatttgcaagtgaaaacatatattttgggggaactgccttgttattttaagtttacattatacctactttaattccagaatgtcattacagaggaaaaaaaaaagcttgattagctgagtaacatcacttttttaaccaatgcactctcctactgcttagttccttacagctggataagtgggtaacctttgtgtccatagattcttaggtagatggaatctattgggaaaggaaatcaattttacacatatacatacacatatttttaaatttcagactgtttttatctaaaatagaagcacggattttgagtccccccaaaatggatattatttgtctcattcgatggacttactataaattctagaatggcgggatgttatgaacggcatcgcacatgctacacaaacacaaattctgctcttacgattacaccattacaagataaatgtattctcaagtagctgcagtattctattaaaatgtagacacaagcagaatcatttttattaagaaaaaaagcagagcaaagcatttaaaatataaataaaatataaaaacaattgctttcctattaaatacaaaactagagagcactgtttcaaattggtaagtcatatctgtttaatatgattgcaattatttatggggattaggaaaattaatgtcaaatctaatattttcgaaaaatggaagactcaattaattaaccagacatttcatcctggaatcctatttctttttctttccagagggaacctaaatggagattatattagagaattaagtttgacagttaatttatgaagaactaatattataagtatcaattaaatagaggtgagggatatatggaattagtttgagttgttaaactgaccatttcaaaaattagaagtattttatcactaatacagatttgagaaattattagcaattctaaattattcagatttgcttaaattcaatgattatgatttagatgaattaagaaagttactcagtttgtttaaactgtggaagttaactttagtgtcccaaacctgggacattagcttcattttatttcggctatgccaggatatatttgaagctcgtattctgtacaacagtgtatactattgtagagaatggggatggataataataataaaatatcactttgtcagtaaataaatattcactgaatgataattgtgtgctaaggaatttatatgtatattatctcattcaattctcataaaatctgtgtgatagggcccagtatagttttctgttttccaattgaggtaactgggtcacagagaatgaagcctcgcaaccatggttatgctgctactatgtaaggaatttgctttaatcccccagtatccctactctaatctaagtcagaatctagacatgcagatcaatacaaatacatttcagcctaaaaaaaaaaaactctgaaagcacatttccaattttgccagcagttagttattcatctacagaagctattagtcccagtttgtaacattagcaaaaattaattttcagtctttttcttatagtttgtcttggtagcttttgacaaagttggccataacctctctctggataggtgacaaggtgcagtagtgcaccttgtctttcagaacagcaatactcttctggttgacctcttattcctttgacagtgacttctctgattcctttagaggtgtctcttttaatttctaaaaaatgctgatggttttaatgtgttatttttatgacacatatcccccttgggaaattgctcttgttcaaccaccgtctcatgctactgactgcagtgtagactgctctatgttcaatcatctactggaaaccaccgttgaaagcttgaggtgcataacttagacttatattttctcaaacctgctctcatactcacttaccctcactagaagtcctctttactcctccctcttttttacatgtccccatgttaaatttcattattcagtcttgattcattaattatttataatttataattttatattttagaatttttttcaggtgctggggatacaattatagacatgattaagtactagtttcatgaggcttatacagtagttacccccttaaccatggagggtacattccaagacccccagtaatgcttaaaaccatggatagtaccaaaccctgtatgtatgtatgggtatatatatattttatatatatatatatatatatacacacatagcatatatgtatatgctatgaatacatgtatacatatatgctatgaaaacatgtatacatatatatttatgcataacacgaatgaagaatgcataacaagaatggagcaatgcatttaaaatataaataaaatataaaaacattactttcatattaaatacatatatgtatgcataacaatattttggtaaactatagactacataaagacagtagccctataagattataataagatatttttactatatcttttctatgtttagatatgtttagatacacaaatatttaccattttgttacaattgattacagcttttaggacattaacatactgtcctaggagcctaggatcaataggctatactacatagcctaggtgtgtaggaggctagaccacctaggtttgtgtaagtacactctatgatgtttgcaaaacaaaatcacctgaaaactaacttctcagaatgtacccccatcattaagtaatgcatgactgtgctgttttttcctttatgtccatacctatgataaaatttaagatataaattacacacagtaggaaattaatcacaataactaataataaaatagaactattgtaacaatatactgtaataaaagccatgtcattgtggtctctctctctaattttattgtactttactcacccttcttcagatgacatgaaattacaagacacctatgtgataagatgaagtgaggtgaatgctttgggcattgtgacataacatttaaaacatgaattatttctggacttttccatttaatattaagctgctgttgaccttaggtaactgaaactgcggaaagcaaaaccaaggataaggatggtctcctgatgagttagggttgagaaaacaaatctgtaaagaaacaaataatatgctttctactagggatgagtgttttgaaaaaacataaaacagatgagtaaataaagagtgaaaaggcatagcattttatctaaaatatacattgagtgcaatgtgtcagttgagtgaactatcttggttgcaaaagtcattaaggctcttaggagtcgtgaaagccttctgtgagaaggtgattttggtcacagtaatgaatgatgaaatggtggaattaatgaagagttggtgaaagagacaaataagaaggaaagcaagtttaaaggttctgaggagtgaacaatttggcacttcccatggtttcatttaactgtaagatttgcttccgaaaatatttctgtctttggtatcacttgtcttactaggtactgtaggctttgggctttttctaaatccagtattcactaagcagtcagagtttctggtttatctacacatacaaatccgtttatatgatttcagtgcttatacctttctagatttccatgtacaactgtgcactgcaaaacactaaggaatagcattcacttagactaggatgtaagcattactccatggagttgtgtgacatgctggccctaaattccgtgccatcgatagcgggaggaagtagaaatcctttgacaattattttcctcttgatctaggatacaccctttgctggagtctgatttcttataattttctactactacatgctacattgtggtagtttatggttctgttaccctaattcccttcctcctccctgtagtgacttccttttctggttaacacgttttcattctttgaacttcagctcagataaaacatatgtggagcagacttgccaagtctagattaaatacctgtggtgcaacactgccaaattgagagacatttgtctctcaatttttcatatcatttgtagtttttttttttttaagacagtctagctctgtcccccaggctggagtgcagtagcgtgatctcggctcactgcctcagcctccccagtagctgggactacaggtgcgtgccaccacgtctggctaattttgtatttttggtagagatgggatttcaccatgttagccaggatagtcttgatctcctgacctcatgatccgcccgcgtcggcatcccaaagtgctgggattacagacgtgagccatcgtgcctggccccgtttgtagttctaaaattcaagtctggatatattagttccccgcttaaaatgcctcatgtcttcccactttctataataaaaagtctactatccttcgcatgacattgcctttattttaaatctccttacaattctcgcatctttttcttgagagtcccattgtcaagtatacacttacggtttcctgactaggccaagtggttcccagcatagctctgtgtaaccctctggaattctacagtcacctgtccatctccaaaggctcagtcaagtgtcacatacactgtcaggttttttctgacccaggcatagaactgcccttctcagtgtctctgcttttctctgtgtggacttctatcacaacacctattatcatttactgagtttagtcgtttgtttttctgtcttcttttgtaaactcatggaggatgagactttatttctgaacagtggagacagctggcacctgagagttgcttatttgagtagatgaacgagtgatttaaaaaatttgggaaggatattgaaatgaacctaattgtggtaatcatattcttaataaatacaaactgagacaaaagatttattctgtgaattttgttttgccctcaaaataaagtagtatctcatttcatacgtagtatgttggaatgttttgccatggctgctatactgattggcattgctcactgctgttcgttgcaatatacaccagctgtttttcagcagaatgagtggtacaccttaaaagccaagtctttctccccgaacagagcgctgggccaggctcaaatctgtcatctaatcactcactgtgtgctgaacactagtctgactttccacgtgatctttctacactttttgcacacacgcccacacattatttatgctcaaaagaatgatctgttatgagagtacagtgaatgtgttagtttcaagagataagattgtccagattcagaaacttgtagctgtcatcttctagtttcctcactgcaagtgtggagtaagattggtataacattagttcatcattcttttcagattagaaaatcttacatggtcatctgggagaacagggcaaaacaaaggtcaaatgttatggctagaaatcaagcctgcaaagcaccatcaatggaaaatttgtcatattttatggagaaactataattcttacaaatctctactaacagttctggttgtgttgatgctttggactgtctagagagtcacactcttctgtccattaacttaaaagcatgactttttagtatgttcatttccccatatggggtacaagattagtaatatcttcttttaccaggtactttctctatgatcatggacatttgcctattctaatcagatccctgcatagttatttaggtaacttccttgaagaatatagtactaaggcagaatgaccatataatttattattgaagttagataactttttgagagcgaagaaagcagtacccatagttaccccaggatgacaggcataaattgaaatacgtggtcaacgtagtatatgggagacatgacttttaggagaaaatatttccaaataactcaaatcttaaaaacctccagagacttcaaacccattctgaaaacataatttgctgttcatatctcaaaataacatggttatcacctggggatagaaagatcatgacaacactgatgtgtgccatgaaattctttccgtacttacatgaggttgtcaggtccaaactccaaatgcagaaaaacatgcagagaattgtagttcttgagcatctcttcttgaattagagcataacaattaacttttaaatcatttttggatactattgccaatgctttttattttgggtatctttttaacttaagtgctagctttcagaagtggaaagaaggataaatactgtaattatccttctattataaaatattacatttttaattacagcaattatttctagctacaaatctttaaatgtatgatgttttacttatgtttgataataaataggcaatactttgtgatacacagttgacacaagacaaatctaaataaaaaatgagaacatgagcccccttaattttatggattgttttttaaactgactttgcttctatgcaggcctttcactttctgtaaacacttaagggatattttttaatactctgtaaagtaaatttcagaatggaaaacataactccgaggtgtattttcaatccgcacaattttttttcacagaggtgtagaaaacattctacctgttattaaaaaaaattctatgtatttttggtttgtttgtttgtttgtttgagagggagtttcgctcttcgtgcccaggctggagggcaatgttgcgatctcggctcactgcaacctccgcctcccaggttcaagcaattctcccctcagattcccaagtagctgggattacaggtgcctgccaccacgcctggctaatttttgtatttttggtaaagacaaggtttctgcatgttggccaggctggtctcaaactcctgacctcaggtggtccgcctgtctcagcctcctaaagtgctgggattacaggcatgagccaccacgcccagccacaaattctgtgtttttaatagctttattgagatataatttacctgctataaagttactcatttgaagtataaaatttaatagttttagtccatttatagagttgtgcatcatcgtcctaatcttgttatagaacattttaaccatcttctccccaaaaaaccttgatcacattagcaatctctccccattccctctgctgtccacccctcatgcagcccccagccatagacaagaactcatcaactctctgtctctatatatttgcctctttggaacatttcacaaaaaatggtattatacaatatattgtcttttatatctggcttccttcatttagtatgtttttgagattcataggtgttgtagcatctatcagtgcttcatttctttcactgtctaatagtgttccatttcttggatatactacattttatttagtcattcctcagtgggatctttgggttgtttccatttttgactcttaatgctgccatccacgcaaaaggtttttcagtgtttcattttattgtctttttttttttttttttttaacgtatgttttcttttctcttgggtagaattccacctaggagtacagttgctgagtcatatggtaactctctgtttaaccttttgaaaaattgccaaactattttcaaaatttgctgtaccatttcacattcccatcagcaatatctgaggatcccaatttctcttcatactttctaatacttctacatcttttttaatataggcatttcagtggatccctaatgataataggcacttctgattgtttttgtaaataaaatgttattagaacacagccacccccattcgtttattcttttttttttttttttttgttttttggtttttgagatggagtctcgctctgtcgcccaggctggagtgcagtggctctatctctgctcactgcaagctctgcctcccgggttcatgccattctcctgcctcagcctcccatgtagctgggactacaggcgcccgcccccacgcctgactaacttggttttgtatttttagtagagacgggctttcaccgtgttagccaggatggtctcgatctcctgacctcgtgatccgcccgcctcggcctcccaaagtgctgggattacaggcgtgagccaccgtgcccggctccattcatttattcttattgtctatgggtatttttgtggtatgatggcagagttgaaccacagagacaacatggctcacaaatcctaaaatatttattttctgaccctttacagaaaaagttcaccagcctctgctttagcgaatcaaaaatttacgtcctcaatcatgttttatttacaagtgattggcgtatgtcaggatgtttagtgagcgatacaggagtatttcattgtatttggagggaatgattgaaatgattttatacagataatcttctgaatttgtgattggtgttatatttcaatttatcaatttattcatatttatttaacaagttattacatatatatttattcggtatagttgtgaaagtcttattatatgccagtggctgtgttagaatttaaggataatgcagtgaggagcaacaagacccctgctttaacagagcttacaatttatggaaagactgcctcttactctgaggaaggtgggagtcatccagtctacagtggagctgagggcctgagggaaagaactgttagaacagatcactggtacaagatctgtagttctgaggaggagactctcctctttgtataatttctcagagcctttaccgtatgaaatatgcattgcatatctctagcaagatttccaaggtacctgagcaccagatctcttagtttgatgaagtatttagggctccacgaaacattttctgaaaaaaaaattacatagaacattgttggtcaagaattgtcagatgaaaagattcttaaaagaccctagaaacaaaacgagatcatttactcaacatctttctttttctagtgctacgtgaccttttaatcttgaaatttttcttgtgtagatgttaggcctgtaaattagttatggtaatgtcaattcaaagggtctttgaagtttagtttgtcctttattggattcctgtctttcatatttgtctttctaaagcactttaaaatcttggagaagaaagttcaaggaaagatgatataatagattattcttccttgggctgcaatacttttaaaaggattattccttatctttttgttaaattgacttctataaatttttcaaagtgaagtgttttggttctcaaaggctaggagtatccttttatcttctttttctattctctcatattttccttccttgacaaattcatggctgaataacagtatcgaaatgttatcataattctttggctaattatttttgtcaagccccccaaaaggcaaaaacaagcactgtttaaaatgtttagtttggcagcatgagataaattagaagtgcagagaatgagcaacctatgagatcatctgtctgctgctacgtgcagcccatcacaattctagactgttagaaactcaagctcaattacccactttgctattcagttcctgcatactttgcgtgaataactgccccactctgtaactcagattcctcagctgtataatcaatggagttaataatacttatttcagttattgtgaagcaccgagtagatggttggcatgcaataaatatagttaccaacctataacattggtctaaggaatgaagaaacatctgttagaaagacagctttttaaatgaaaatactaatagtgccctgaagaaagatttatctttcttagtatgtcacagttaccagatggaaaaatcagcaaaatacaaaacacttaatgaatataggtatcatgatatcattatgatcataaggaaaaaagtggaacagttagatggggttataactggtaaatccatacttgaacgagatgtctaacatttagagtggagttcccctgggtttattaaaggttagtgttctctatcttccccagggagaattttataaatatataaataacgatatgaattacctctttggataaatatataaatgctatttaataaaaaaaaaatgtgtctgacctaaagctggaagggattgataatacgttgaatagcagaatgatgaccataccatatggataggtgatgtggtaaacctaatttgtgagctaattttttttgaagaaatgtgagaaagatcttttttggattcacaatattatcttcacaaatctttgaaagggaaaatgtaagtgtggaaaagacttcagtatttaaaattactgtaattgcaaaataagagttatagtgtgctaagggagatacttctgacaaaaacagtcccatgtaactatagccagatcaaattgatatgaagtatctgcaacagtnnnnnnnnnnnnnnnnnnnntcaatttcagaacttgttattggactattcaaggattcaacttcttcctcgttcagtcttgggagggtgtatgtgtccagtaatttgtccatttcttatagattttatagtttatttgcataggggtatttatagcattctctgatgattgtttgtatttctttagggtctgtggtgatatcccctttatcattttttattgtgtctatatgattcttttttcttctttattagtccagctagtggtctattttattaatgttttcaaaaacaaactggattcattgattttttgaagggttttttgggtccctttctccttcagttctgctctgatcttggttatttcttgtcttctgccagttttggggtttgtttactgttggttctctaattcttttagttgtgattttaggatattgatttgagctctttctagctttttgatgtggacattttagtgctacaaattttcctcttaacactgctttagctgcatcccagtgattttgatacattgtctctttgttctcattggtttcaaagaacttcttgatgtatgccttaatttcattatttacccaggagtcattcaggagcaggttgttcaattttcatgtagttgtgtgcttttgagtgagtttcttgatcctaagttctaatttgatggcactgtggtctgagagactggttgttatgatttcagttcttttgcatttgctgaggattattttacttccaattatgggatcaattttagagtaagtgccatgtagcactcagaagaatttatattctgttgttttggggtggagagttctgtaggtatctatcaggtacacttgctgcagaactgagttcaagtcccgtatatccctgttaattttcaattgtgatgatctgtcttatattgacagtggggtgttgaagtctcacactgttactatgtgggaatctaagtctctttgtaagtctctaagaacatgttttatgaatctgggttcttctgtattgggtacatatatatttctgatagctagctcttcttgttgaattgaaccctttagcattatgcaatgcccttctttgtcttttttgatctgtgttggtttaaagtctgttttgtcagaaaactaggattgcaacccttgctatattctgctttccatttgcttgttaaattttcccccatccctttcttttgtgtctttgtacgtgagatgggtttcttgaatgcagcacactgatgggtcttgactctatccagcttgccattctctgtcttttgatcagggcatttagcatgtttacatttaaggttaatattattatgtttgatttgtgtgtccttggtctttgttcttcagtgtgtttttgtaatggctgttaacgatttttcccttccatatttagcccttcctacaatagctcttacaaggcaggcatgatggtgacgaattccctcagcatttacttttctgaaaaagatgttatttctcctttgcttttgaaacttagtttggccagatgtgaaattctgggttggaaattcttttctttaagaatgggagaaaatttttacaatctacccatctgacaaagggctaatgtccagaatctacaaaaaacttaaataaatttacaagaaaaaatcaaacaaccccatcaaaaagtgggcaaaggatatgaacagacacttctcaaaagaagacatttatgcagccaaaagacacatgaaaaaacgctcaccatnnnnnnnnnnnnnnnnnnnncatcttaaatttatctgactattctatgtttcaatattaccatttcttcttgattgaaggatgtcattatgcctgtttgtgcatataatgaacagatattgatttctaaataccactcactaaacacacattgaaaactgggaaacttaaatggctgatttcaggtctgcaacaagaaagaacaaattgggttatgccagaaagcaatggcatactcaatggttaataggataaggttgaaaaggcacagatgctctgtatagggaatttattgaccacatttggggtatgtagcttcagtaagaaaaatatagaataacatgttgaattacaaaaaaaatccaagagtacatagtaatacaagagataaaaagaaagacaaaaatggcagttcttttaaaaaagaattatgtgattttattagcccttcttcaccctattgctgatagagggattcctactctagtgttatatggatgacagaatataacacctgacactgggcagatgagatcaactgcagttcatacacattcatactcacatatggcatacatatatatactctcagctagggggggagagcaccccatgccacagaggcccacacaggttgcacttgggaacaaagtgaataaccagggactgtggacagcaagatttatagtgtcaacagagggaaaggccccagtactcatgggaggatgtggttggtttagttatttttttattttaaaatgtaatgtaaattaattttaagttctgggatacatgtgcaggatgtgcaggtttgttacataggtaaacgtgtgctatggtggtttgctgcacctatcaacctatcacataggtattaagtcctgtaagaattagctgtttgtcctaatgctctccctcccctcaccccctcaaagggccctagtgagtgttgttcccctccctgtgtcaatatgttctcattgttcagctcccacttagaaatgagaagaggcagtgttttgttttctgttcctgtgttagtttgctgaggataatggctcccggctccatccatgtctctgcaaagacatgatctccttcctttttatggctgtataacattccatgatgtattttctttatccagtctattattgatgggcatttgggttgatttcatatctttgctattgtgaatagtgctgcaataaacatgcacatgcatgtatcccagtaatgggattgctagtcaaatggcatttctggttctagaaatgccatttctggttctagaaatgccatttctggttctaggtctttgaagaattgccatgctgtcttccacagtggttgaactgatttacattttcaccaacagtgtaaaagcattcctatctctccacagcttcaccagctctgttctttcttaaatttttaataatcaccattctgactggcgtgagatgcttctcattgtggttctgatttacgtttctcaattgatcagtgatgttgagctttttttcatgcttcttggccatataaatgtcttcttttgagaagtgtctgttcatgtcctttgcccactttttaatggtgttgtttgttttgtttcttgtaaattaatttaagttccttgtaaattttggatattagacccttgtcagatggataaattggaaaaattttctcccattctgtaggttgtctgttcaactgatgatagtctcttttgctgtgcagaagctctttagtttaattagatcccatttgttaattttttcttttgttgtaattgttttggctgctttcatcatgaaatttttgcctatgcctatgtactgaatggcattgcctgcatattgttctaaggttttcacagttttgggctgtacctttaaatctttaatctgtcttgagttaatttttgtataaggtgtaaggaggggttcagtttcaattttctacatgtggctagccagttctcccagcaccatttattttacatttatttatttatttagtttttgttttttttctaggtcaagtttttttttattattattattatactttaagttttagggtacatgtgcacaacgtgcaggtttgttacatatgtatacatgtgctatgttggtgtgctgcacccgttaactcgtcatttacattaggtatatctcctaatgctatccttcccccttccccctaccccacgacaggccccagtgtgtgatgttccccaccctgtgtcccagtgttctcattgttcaattcccacctatgagtgagaacatgcggtgtttggttttctgtacttgcgatagtttgctgagaatgatagtttcccgcttcatccatgtccctacagaggacacgaactcatccttttttatggctgcatagtattccatggtgtatatgtgccacattttcttaatccagtctatcattggtggacatttgggttggttccaagtctttgctattgcgaatagtgctgcaataaacatacgtgtgcatgtgtctttatagcagcatgatttataatcctttggttatatacccagtaatgggatggctgggtcaaatggtatttctagttctagatccctgaggaatcgccacactgacttccacaatggttgaactagtttacagtcccaccaacagtgtaaaagtgttcctatttctccacatcctccccagcacctgttctttcctgactttttaatgattgccattctaactggtgtgagatggtatctcattgtggttgatttgtatttctctgatggccagtgatgataagcattttttcatgtgttttttggctgcataaatgtcttcttttgagacgtgtctgttcatatccagcaccatttattaaatagggaatcctttcctcattgcttgtttttgtcaggtttgttgaagatcaaatggttgtagatgtgtggtgttatttctgaggcctctgctctgttccattggtctatatatccgttttggtaccagtaccatgctgttttggttactgtagccttgtagtatgatttgaagtcaggtagcatgatgcctccagctttgttcttgcccagaattgtcttggctatgcgggctcttttttggttccatgtgaagtttaaagtagtttttttccaattctgtgaagaatgccaatggtagtttaatgggagggaataacatcgaatgtataaattattttgggctgtatggccattttcataatattgattatacctatcattgaacatggaatgtttttccatttgtctgtgtcctatcttatttccttgagccatggtttgtagttttccttgaagaggtccttcacctcccttgttagctgtattcctaggtattttactccttttgtagcaattgtgaatgggagttcatttatgattttgctctctgcttgtctattattagtgtataggaaagtttatgatttttgctcattgattttgtatcctgagactttggtgaagttgcttatgagcttaagaagtttttagactgagacagttggggttttctagatataggatcatgtcatctgcaaatagagacagtttgacttcctctcttcctacctgaataccctttattttttctcttgcctgattgccctggccagaacttcaaatactatgttaaatagtagttgtgaaacaggacatccttgtcttgtgctgatttgcaagaggagtgtttccagcttttgccctttcaatatgatattggctgtgggtttgtaataaatggctcttatttttttgaggtatgttccttcaatacctagtttattgagaatttttaacatgaagcgatgttgaattttatcaaaggccttttctgcatctattgagaatcatgtggtttttatatttagttctgtttatgtgatgaattacatttattgatttgcatatgttgaactagccttgtatcccagggatgaagtgacttgatcatggtggataagctttttgatatgttgctggatccagtttgccagtattttgttgaggatttttgcattgatgtttgtcaggcattgatattggcctgaaattttctttgtggtatctctgccaggttttggtatcaggatgatgctggctgcataagatgaattaaagagaagtccctctttttcaattgtttgcagtagtttcagaagaagtggcaccagctcctctttgtacttctggtagaattcagctgtaaatacatctgatcctgggctttttttttgtggtttgtaggctattaattagtgtctcaatttcagaacttgttattggactattcaaggattcaacttcttcctcgttcagtcttgggagggtgtatgtgtccagtaatttgtccatttcttatagattttatagtttatttgcataggggtatttatagcattctctgatgattgtttgtatttctttagggtctgtggtgatatcccctttatcattttttattgtgtctatatgattcttttttcttctttattagtccagctagtggtctattttattaatgttttcaaaaacaaactggattcattgattttttgaagggttttttgggtccctttctccttcagttctgctctgatcttggttatttcttgtcttctgccagttttggggtttgtttactgttggttctctaattcttttnnnnnnnnnnnnnnnnnnnnnnnnnnnnnnnnnnnnnnnnnnnnnnnnnnnnnnnnnnnnnnnnnnnnnnnnnnnnnnnnnnnnnnnnnnnnnnnnnnnnnnnnnnnnnnnnnnnnnnnnnnnnnnnnnnnnnnnnnnnnnnnnnnnnnnnnnnnnnnnnnnnnnnnnnnnnnnnnnnnnnnnnnnnnnnnnnnnnnnnnnnnnnnnnnnnnnnnnnnnnnnnnnnnnnnnnnnnnnnnnnnnnnnnnnnnnnnnnnnnnnnnnnnnnnnnnnnnnnnnnnnnnnnnnnnnnnnnnnnnnnnnnnnnnnnnnnnnnnnnnnnnnnnnnnnnnnnnnnnnnnnnnnnnnnnnnnnnnnnnnnnnnnnnnnnnnnnnnnnnnnnnnnnnnnnnnnnnnnnnnnnnnnnnnnnnnnnnnnnnnnnnnnnnnnnnnnnnnnnnnnnnnnnnnnnnnnnnnnnnnnnnnnnnnnnnnnnnnnnnnnnnnnnnnnnnnnnnnnnnnnnnnnnnnnnnnnnnnnnnnnnnnnnnnnnnnnnnnnnnnnnnnnnnnnnnnnnnnnnnnnnnnnnnnnnnnnnnnnnnnnnnnnnnnnnnnnnnnnnnnnnnnnnnnnnnnnnnnnnnnnnnnnnnnnnnnnnnnnnnnnnnnnnnnnnnnnnnnnnnnnnnnnnnnnnnnnnnnnnnnnnnnnnnnnnnnnnnnnnnnnnnnnnnnnnnnnnnnnnnnnnnnnnnnnnnnnnnnnnnnnnnnnnnnnnnnnnnnnnnnnnnnnnnnnnnnnnnnnnnnnnnnnnnnnnnnnnnnnnnnnnnnnnnnnnnnnnnnnnnnnnnnnnnnnnnnnnnnnnnnnnnnnnnnnnnnnnnnntttagcatgtttacatttaaggttaatattattatgtttgatttgtgtgtccttggtctttgttcttcagtgtgtttttgtaatggctgttaacgatttttcccttccatatttagcccttcctacaatagctcttacaaggcaggcatgatggtgacgaattccctcagcatttacttttctgaaaaagatgttatttctcctttgcttttgaaacttagtttggccagatgtgaaattctgggttggaaattcttttctttaagaatgggagaaaatttttacaatctacccatctgacaaagggctaatgtccagaatctacaaaaaacttaaataaatttacaagaaaaaatcaaacaaccccatcaaaaagtgggcaaaggatatgaacagacacttctcaaaagaagacatttatgcagccaaaagacacatgaaaaaacgctcaccatcactggccatcagagaaatgcaaatcaaaaccacaatgagataccatctcacaccagttagaatggcagtcattaaaaagtcaggaaacaacaggtgctggagaggatgtggagaaataggaacacttttacaatgttggtgggactgtaaactaattcaaccattgtggaagacagtgtggtgattcctcaaggatctagaactagaaataccatttgacccagccatcccattactgggtatatatccaaaggattataaatcatgctgctataaagacacatgcacacgtatgtttattatggcactattcacaatagcaaagacttggaaccaacccaaatgtccaccaatgatagactggattaagacaatgtggcacatatacaccatggaatactatgcagctataaaaaaggatgagttcatgtcctttgtagggacatggatgaagctggaaaccatcattctcagcaaactatcgcaaggacagaaaaccaaacaccgcatgttctcactcataggtgggaattgaacaatgagaacacttggacacagggtggggaacatcacacaccagggtctgttgtggggtgggggtaagggggaaggatagcattaggagatatacctaatgtaaatgacgagttaatgggtgcagcacaccaacatggcacatgtatacatatgtaacaaacctgcactttgtacacatgtaccctagaacttaaagtataaaaaaaaagaaaagaatgttgaatattggccctcaatctcttctggaatatagggtttctgctgagaggtccactgttagtctgacaggcttccctttataggtgacctgacctttttctctggctgcctttaacattttttccttcatttcaaccttggagaatctgatgattatgtgtcttggggttgatcttctcatggagtatcttactggggttctctggatttcctgaatttgaatgttcacctgtcttggtaggttgaaaaagttctcctggatgatatcctgacgtatgttttacaacttggtttcattctgcctgtctctttcagctacccctatcagtcataggttcagtctttttacataatctcatagttcttggaggttttgttcattccttttcattctttttttttcctaatcttctcttcctgttttatttcagcaagatagtcttcaagctctgaaattctttcctctgcttgatctcttcagttattgatacttgtatttgcattgtgaagttattgtgttgtgtttttcagctccatccggtcatttatgttcctctctaaactggttattctgtttaacagctccttctgaagactacttccgtcagtttatccatctcagcctctgcctagttctgtgctcttgctggagaggtgctgcaatcatttggaggagaagaggcactctggctttttgagttttcaacattttttcattgattctttctcatcttcatgagtttatccagctttgatcacagaagctgctgacctttggatgggtttttttgtggggacttttttgttgacgttattgttattgttgctttctgtttgtttatttttcttttaagagtcaggctcttctttcataggcgtgctgcagtttgcttggggtccactccagactctatttacctggttcctttccacacctggaagtgtcaccagtggaggctatagaacagtaaagatggctgccttttctttcctctgggatctctgtaccagaggggcactgacctgatgccaacagaaatgctactgtataatgtgtctggcaaccctaattgagggttctcctccagtcaggaggcaccggatgtgggactcactaactgaggcatgttggctgctccttggtggaggaggtgcactgtgctgggaggaatcccacttgtctagactgcccagattcctcaaagccagcaggggcaaagactaagtctactgatttgcgaagactgcggccacccctccttctaggggctcagtcccagagagattagagttctgttgctaaaaccctggctggagtttctgaaattcttgtagggagggcttgcctagggaaatggtgtgggtaaggatccagcctaaagaggcaatctggccacactctgccacagccacggtgctgcactatggggaattcctccagggtccaaaccatccattttccctggcattgcaggggaaagatggcaaactggagctgcagtgatggcggccacccctcctcccggaactcagtcatcttatgcagcaggcagccacagtgatggctgccgcccttccccttgaaagctcagccatcttaggcagcatgcagccacagtgatgatggccacccctccctctgggaactcggtagtcttaggcagtctccagccgagtagccgctgagaatctgcacaactctgcggttcagacccaaggctctggtggcgtgggctgacaagggggatctcctgatctatgggttgcacagatctgtggaaaaagtgtggtttcccaggcagagtagcaccatcactcaccgcctccctcggctgaaggtggtagctccccttgccctgtctgactcctaggtgggctgtggcaccactctgcttttccttactctccgtaggtcacaccaaccacctactcagtcccattaagaagacctggatacctcagttcagtctgtttaaataattcttcaagtttgcaggcaactgaaactcaccagttaatgattaagtagtagccgcacctgttccatttgataagaaaggttatttggagaggatcttagctctagaagcccaatggggagggaagcttgtggttaagttattggaggccctgtgatttcaccagatatccagtcagcacataattttagacattagttcttaggctttatatcatataataaatatggctggaatgatagactagaaaactcttgatgtttctgtcctaatattataatttattaatgaaagaattatcaatacattctaaaatcattgggcaaaaagtgtttaagaatagaatattcatgttttcaaagcatcattgcacatattacttgaaaggtggaacatgtccctttaaaatggaaagatcatacagtgacaatcttaaccaagtggctaagtttggcattactgatggtgtaaagcctaactttttgtttcttctgatgacatgcaatgggagatacactacaccagttttgtggtattcttaccaaaaatgttgacctcagtctaatcgcaaaaaaaaaaaaacaaaaaacagacaaatctatgatggtatgctttgcgagacagctaccctgggcttctcaaaaagttaatactttaatattaaatcaaaatatgtaataatgaataataggggaaaacatcaactattttaaattagataagactaaagtaacgtaacagtgaaatgcaatgcatgaagttgcatgacagaccgaaaagatataaagaacatttacgtgactattgatgaaatgtaacgtaggttgcatgttgtataattttattaaactgtttatttttctcaggtgtggtaatggtgttgtggttatatattcttgggaggcccatacttaaatataattgtgcaatctcctttggatcattcaacaaaacagttgtgtgtatgtttatgttaaaagagagaaggagacagagagagagaaaaggagagagacagaaaaagagagagagtgagagaaggagagaaggagaaaaagtgagagaaatgaagtatatatggaaagatgttgagaattagtgattctaagtgaggattatgcagatctttattgtactgttctttcaacttttcttcaagtttgaggtttttaaaagtaaaaaaaaaaattaccacatagctgaaggtgaaaacataccaattatggtggataaataacttaaacagggagtcagacttctgctcacatcccttatcataataaaattgcagaatctaagaggaagtggaatcttaagagattttagaagaaaggcagtctacagaagacaagcaatttaaacaggcctctcagcaacagccattagaaacctaaatacaatggaatgtaacttcagtgagctgaaatagcttaaaattctgtacctagccaatacacttttcctgagggtaaaatatatgtttgaacagataatctgggataagccaaaaacaaatactcagtaaaataaatgttaaaggtataatgtaaacagaaaaaaaaatccagatgtgaaagtaatgatacaaaaagaaattatgagcaattatattggcaaaaatgtgactaaatcaaagcaaattatgactatataaagccaaagtaatttgaaattttgtgaagaggaaaaatatctttcaaaaaactgattaaaaaattatatacacaataggaaggggagtaaagtaactgtatactatggcttttgagtagtttgaagaggggtaagttaattgtttttaaattagcataatcacaaaaaatatagatgcaaagtacaaatttctaaaaatagaggagaaaaatagaataagaaaataggaggcacagaattgagactccaagaatatgaaaaatacaatccaggtgatagagtaagattgggcaacagtgacagaataaagattgaggaataggtaaaccaatgaaatatattgttaggagagcatttccaagaccacaaagaaacttagcagctctcaattataaataaaagttattttatgataatactaaaactcttattgaatttatgagtgagccccgaaatagaacatgtttcataggcataagacttgattaaatcactattttctctaggagggaggcccctgtgacctggggggaagcctacacacagctctcactgatggacaagaacagtggccatcccagtcaaactaaacttgtgtgaagaaaaattaagcctagacatcaccagtctgtgacctctagtaccacccttgtacctgtatcacattctactggtataactcaaatataagttcagagtgaaagcactgaatcatgaaactaagagggtaacctgtagaagaagagccagagatctgattgcatgttaggcttcactctagactgtagcctctgaggattaataaaatctttggaatgcaaagatcacttttcctctgaataagatttgtgaaatctctagaattatgcactttcatatacatctgtggttctgcctaattttaatgggtactgccttctgattctgtgggaagaaaatatcatgggactttgaaatccgtcagttgattgcacatttcttgttcagtcaaaatttacttagaattccaagtgtgcatttactaaaactgtgcttgaagggttggtagtgggtgattttaattctctagtattatatgtgattgcagtctggaaggctgaactattttggtgatggccaaccatgcagtaagaaggttaacacaatttgcaatggtaatctctctttcatctacacatttcagtcaaccttggcattatctctaaggccgaatccaagtgcctgtaagccagaagccttcaggaaagagcagctgtttttgtgctctctcacatcttgaattctaggtcaaaatgtcatgtaaaagttttttcactaaaatatctatattgatttctaggaataaaatagaaatgcctggaggattctgtgtattttccctgtaagtcactgaaatatcctggtaggccatcaagaaataaaatggattttgtctccattgtatgattgagtcctcccttgaaatccttgctattatctggaccaacaaatgtgtagagtccagactaagagtggagttgattcagtgtatgtatccatgggattttggtcaacaaaacaggactacttaaagccttgttgggtaggggtttattataggaatcagaccttacacaaacacggaagcactaactgaagagaaagtgtttaagggggactgggatgatcagagaaagaatcactggctggttttcctgaagcgctgactcaggtagacaagaagccaagcatgctctactgccaaagtaggactctgaagggggcacttcagcaaggtctgtaggaagatgttgtctttggtggccactaccactgtgagtccacagccaaatgcccagtggtaggtttggggccaccattagtcagcagggccagctactgaaaaggtggactagattcagagaagaggagaataaggatacactgagtcttgctgggtacccctctacgtatcttaggcatctatcttatgaagaccttctgaaagtagtagcttctgtttctcttcttccttccatatctcactgaacgtctctcttctggccaattctaatgtagaaatatcaggaaagggtattgggaaatgtaatactccatatttgcctgacataagcaagataatctagttagaagctggcaatttccttataacctaggacaattaggaagtagaaattagagtctaaagcagtctgcaaactaggaagacagtggcaaacaggagtaacaggaaacgaagtcaggtgcagtagacaaacatctgtcctggtgttataggttgtgccagtatatgggaggctgagggtcagaaggtttatgcaaagaaccaaagcgaagcaagatttacctctgaaatgacaggaggtcacaggtacatgaaactcaaatgcattacaggttttttttttctttgttatccaaatataaagagcaggagataaatttcatcaccttttgaggtgtttgttaaaacatgtagatttctgaaacctccttgcagacctaggaaccggaatctctagggttttgattcaggaatctgcattttaaatacaatcctcagatggttcttctgtgcagtctagttgggaaatatatgattcgcagagtgacagattcatgctaacgtcatgtcaggtacttactgatctgcttcagcactgagaacagagactgaattagaggaccagatatataagtgatttttttttaactgactcatacagtagattttttttttttttttagagaagataaaattcaggctggagatggcaaataaattattcatgtcacctacctagtaagtgactgggcctatactctaatttagatctacttgactccaaagtgtaccctttgagtgttgaatggagtaaaaggcttcaggcttgcagaattactgacttgcttgctaaacattcatcagtgagacccctcagggaaggaaaagtaatactggtctcctattaaactaagtctgtgtggatttctaagaaaagtcctggaggccaacattcccccaaataaaagaactagtaatggaggaaggcaggtcctgaaaaaatcactcccaagaaaaatgagaacttcacactcgctttgttttctgcccctctcctcctccctctctgtggacccagcacttacaactactatgacctcttccatctttatgtgtcttcatcataccaagtattcccctttcttatctgaaaaagaaaaaaaagaagaaaggaaaaaaaaaaacgacatcttgatctcgtttatatggaattaattttacagttaataagtaaaacctaatattttttgtctacttttttgggagcaatatggtgaactcatattggcaaagttatttaatggttttatgaaggaatagataagtgtgagtgagaaagtgtggaatcagatcgcagctgtaaagataagctgaactatggcagcgcaatgtgacccctagtccttgcattctaatttaggttctgctgggaagctttacgagattattgaatacctttctagcaattagagctggcctggatggttccggttgccttgggaatttggaaattcttctatgtgaaagatgtttctgcaggagctgatcattatacaccgatgttacaaacaattaatttataaagtacaaagtttcaatttcacagtgtttattttgtttttttctgttagctatctgttcaccagataactatcattctttccatatcttgtggaattcctgctaggactaataagataggaactggaaaatagctttgaaaatagaataattactttgaaaatagaataatatgtattatatgatatacatacaggaaagtactcctgcaacagcaacaattgtactgattctaatatcccaaatccagcggctgctcttcaccctctctcctagcccaagccatcatttctaccagtttactaccacagtctcttaaatgatctgcctgtgttctgtctgcttccacaagagtccatcgtctactcaaagttgttcagatcctgtcatttccttgccataagaggagaatcaggacaagttttgccacggcatcaaggccccgcgtgatttgtcctcacctgttttcccagtgtcatctcctcacagtcttccttggttatctgcatttcagcatcacagacttgctttctagtccccaaatgtgcccacctcatttccatctttgtctgtgctcttcccgttcatttccaatactacctcttcagagagacctctttaaaccagcctacataaatgaaccccactctctccctctatcctagtatcctgtttagtctttttattaccgtacttatcactgtctgaagttatctacttatgagtctctatgtgtattattagttttctgctattataccgaagtgcaagctcaataagggtaacgtctttgtcttatatcctcagttcctagaagaatgcctgtcagatactgggttcaatgtgcatgtggaataaatgaatggataaatggaaggaattcaattatatttgacatttggtaggcagccagattcagtgaaattatggaatactggtgcctcaaaacaaaaccttttcttatgtcatttcatatacgatagtgttaccaagtatcaaccttttcagccacacagcctgaaataatgaaatggaacatagtagttggacttggaaccaacttctgccttaagcagaaagctcatgcagaatttaaagcgattattaaggaaagaaaatcctcttcaacacccacagaaagatagggcattgcttttcaagtcataagattttcagtaattagataggagaattataaatatattatttgcatgttacacattcctgtaactctaaccatccaaatatggtttctatattcaaaataggtagcaatttaaatataaatgagacaatgcctcatacatacaatataatatttaacttaaaacaccgagatggttaattccgtgtgtcagttttgctagctacagtgcccagatatttggtcaaacattcctctggatgtctctgtgacagtgcttttttggatgagattaacattcaaatcagtggactttgaataaagaagattaccctcccacaaggtgggtgggctcatccattagtttaaggtcttatcagaaaaaaattgaccttccttaagcaagaaggaatgctgccagccaactacctttgtacttgaactgcaattcttttccgcgtctccagcctgctaatctgtgccattagattttggactctgcagtctccagggacaatagcatggcacagtccctaaaataaatttcccaatcttcctctctctccttctcttcttatttctcttaaattccctttctctttcaatctctctatctccctctctcctttccctatctctctatctctctctctccctctcagtatctcatacacacatacgtacaaatatatgtgtgtttacatatatgcatatgcattatatatatatttatacacacacatcttgtcctgtttctctggagcattctgatacagacacatttctgattatagatttaatatatactatattgtagtttaaacatatagatatatagagagagatttaaaatatactatgttgtagttcaaaatatactattgaaaaaatttacataacctgtccaaatgtttatttggctattaattcaattaaacagattgacctcatctatcatttctgatagattacttctaagaaacagaagatggtaagtaatatctcatgcattatgaagtcatttaaattatttaacatgcattaaaggagaaattcaatgtagctcatttcttcaggtttactaattaaagtcagtcttgactctagaaataaaaaaaaaaatgcgtaagaagagcaactgtgacagcattaatattcagtgaaattgatgaccttagtgggttagttttatataaactgttacggtacgtacaacttgtcactgtagttcaaagttatgttcaacacaatggttcttcttaattgctcaagacactccactgtgacattggctacttcggctgcaatagagagattaaagaatcaagtcattgtattttacagttaacaggattgctaataaagaatagtagcagcatgaaaaattgtagagaggcagtaaaactgaaagctcaagggtctacctgtatagactgcgaaatccatatactgcaccaagattacaaatggtgattaaagaggagcccacgatataatagattaaaacaaaaggttaggtgtctaacagaacactggatgattctgggaggatggggcacataagacgttataaaaacagagttatattccaaggccctttttaaattacaagaattacttgtacttttactggcattagtttttgcctgcaaatgttgctagattcatcatacttttagaaagctgattacaaggttttggtctgttcccatgaaattccatccccagattttgtgacagtagcccttcatttagcaaaaactcatgagtttcttctctgtaccagttgctgatgagcttagtcagttattttttatgctgtcactgtttagggcaaatcaaaccattgtctaaacagttcactttggaatattgtgaaaaaaataaagtagagatccacttaaaaatgttgaatgtggttcttgtctttatctttgttggtactttcctgtcattgccataatcattggctccattagcacctgactggccaatcaggtcagttgactttgttcatctgagccactgaacatttctaaatccagtctcatactgcacatcaactgtggttccccatttgtaaattaaaaaaacttaaccatgtctaacccacaggaaaataatagtttctttttttaaatatatatatatttttattatactttaagttctagggtacatgtgcacaacgtgcaggtttgttacgtatgtatacatgtgccatgttggtgtgctgcacccattaacttgtcatttacgttaggtatatctcctaatgctatccctcccccctccgcccactccgcaacaggccccggtgtgtgatgttccccttcttgtgtccaagtgttctcattgttcaattcccacctatgagtgagaacatgcggtgtttggttttttgtccttgcgatagtttgctgagaatgatggtaataatagtttcttagtttacttgttcactgaaggactggatgcaatggctcatacctataaacccaacactttggaaggccaagatgggaggattacttgaggctaggagttccagaccagcctgggcagcgtagagacactccgtctctataaggtatttgaaaaaaaaaaaaaatagctaggcatggtggcgtgcaccacctgtagtcctagctacttgggaggctgaggcagggaggatcnnnnnnnnnnnnnnnnnnnnnnnnnnggtggagttaacagtcagtaccactaatctccatattttaatgtggtttatataaactataccaccaaagatataattatttatattgaaatatcagcatgcctaacaacataattggattctatgtttatttgcaatatgagtaagtcagaggaaaactgatagagtaggaaagtcagatttcaaaggtgaactgtataggaacttgccctttggtcttacagtgctgtctcctattattttaagcattcaccttaatgataccatgaaaagtattctcaaatgggatcatataggaagccaagacacagactgttttagcttaaagggccctgagaattgagattgttttgaattcctaaacactttccttatgttataggccaagcccaagtcccaaatgtgctttactctgttccactgagttttaaaactttgtatcagttaccaacattgaatattgagagttttgatatagagatagtaattttcaatttatttagaagattagaaaatgtggtacacatccctgcatgactatgataagctggagctgagaagctacaccctctttcagatgagtcctgtgatactcagggcttcccaatccccaccagccactttattttttacatcacctgcctagaaactatatcaaatgacttctcagtcccttagtctgaatccttcatttttcccatgtaataatttgagttatgaatagaaatagtaatttgcctgaaattgaggaaaatgaaactcccccttactaagccatcatgttatatccccttcttccttattataaaaaaaattatgctgttcagggtggatgcacgtttaagtcaaaatatagaaagtaaacaaaaccattaagttcttaggcacatttgcaaaaatgactcattatataacatgctatgttccaatattaaaaagcagaaatcagttggggatttctgggaaatgtttgctctacttcctctttttattccaactctatttccttctctgtcttcctatataaaacattaagatgaagctgaagcatttatatcatgatgacgaggtaacaattattgggacaaagcacaacataaatatcatagacaggaaagacagaagagtctaaatatcataaggcgttatgttttgttttttgttaaatatgatcctgactgacataatcctgactgatacacatatatatttcacttcccatcacacacacacacgcacatgcacatacacatgcacacacatgcacgtgcgtgcgcgcacacacacacacacacttctttgccctctttgcctcctcctatttattattttattcaacagagagtgactagtgcttactctatgtcaccatattactgcactggccctgcttctacctggcagtgatggagatcagactgtcacatattgcttctaaacttagtaggctcatagaaattaaaaatagcatgttctacctagagctttaaagatcattacagtggggctattagcactgtgaatgggaacacagcctgactctgggtaaaaaaaaagaaattgaagagattatatatgggagattctataattactttaacaaaattaagagataaggcaacaaagatctaatactgtaagtcccacctgcattatttgtgctgaaacaccatgtctgtacattggctgtgacatgtaataccactgaaacacagggtgtttagcaaacatttagttatttccttaagccacctgggctaacaggcaagggattcctacgtagatggctatactgaaagattttgacaccatttaaaaacattcttaggacttttgagtgaattatgttttcagattatttagtttgggcaggttaaacagactgtttttatacaaattctaaaaaagttgacaaccctgagcctcaatttccttctctttaaattgatgattttgatgattctgaattgtaccactattaagttcctgctagatctaccatgtttagaagtctgtaacgtcactctctaacgctgtttatttttttcttctttgcccctgtgtgcacactgctagctcttctattaatctcagcagatgagggaggtaatttcgtttgaggtcaccaaaactgtaggctataaataggaagtaagatagtcattctatagtaaccataaaaatagttctcatcacattgggatgaaacaaaagtcatgtcacctcactctggagacaagagatttatctagttatttgtaattcctatgggctccagatgcatggacagaaagaaggaagatggaaacatggaaggttaaagacacatcagggcctatcctttgcttagtgtgacacaatcaaaggaagaagaccggctccctttgggtttaaccgctttatcaagtgccgctctatacattacccagagaaatgccttctgaattctagaatttcaggcattgcagtaggcagttgaagttgtggcagcagcacataggaagctttttaaacctctccatgcagctctacgatgattatactcattcattagcctttttcaacaaacaatggtttagcagctggtatgtactaaacactctgctaggccttcaaatatggcattgcacaaggcaagatctttgctatgaaaagtgcaaatgtttaaacaataacaaggtagatgttgtattagaaatagtacatggtaaaaaaaaaattaacaaacaaaggactgggtaacatgactgagggtacatcttagtctgtttgtacactacaacaaaatacctgatactgggtaatttatataaaacagaaattaatttttcacagttctgggggctgggaagtccaagatcaaggcactgtcatgtgatctgatgagggctttttttgctgagtcctcacatggtaggaagagaaagggcaactagggcaagcctccctaacactgagtgaagccccttttaaaagggccttaattccattcatgaggcaacagctctcattgcttaagcatttcttaaaggcttcccttcttaatgctaccgcattgaaaacacatgaattttggaggtgatttacgttcatcgtgaattttggagggagcaaacacattcaaaccatagaaggatgtgactaatgcagtaaagattcatatcacttttattctgtgcaaagaaggaaaaacttattttatgttgttactttagtttgcatgtctgagagagggcaagtgatccctcacatctagcttactaagatttattcacttaaggtaccagaagaattctccaccagagcaaaaaaaaaatagtgagaacctaagaattccttcatttagaattaatcctctatatgggaaatatatgtttttaaaaactgaactcatagaagcagagtagaatcgtagttaccagggtctgtttagggtcagggtgggggcattggtgcgatgttggtcaaaggatacaacattatagttaaataggaggagtaagttcaagagatctgttgtacaacatggtgacgatagttcatatcaatgtatgatattcttgaaaatccctaagagagcagattttaagtgttctcaacacaaaaatatatgtgatataatgcatatattaattggctcaatttggcccttccaaaatgaatacgtatttcaaataatcatctcttacccaggtgatgggttcttaggtgcagcaaaccaccatggcacatgtttacccatgtaacaaacctgcaaatcctgcacatgtaccccggaacttaaaaaaaaaaaaaagaaacattaaaaagtagacaatttttgtcaattgaaaaaatttaataaaacttagcctagggtattctaggtaatttacatagattatcccaagggaggaaggataggtagtgtgaacctcttaaagcaaaggtggagtgaagtgagagttcagattagtggcgtggagagtccaacccagttggaaagcaaagcagtaataggagtcatatggaggattctcaatattcacctttgttgccttaacacctagcaggggtagaaggagccaagacttaatagattaatggagtagggacaccaacccagttggaaagcaaagcagtaataaagaccaggtggcaggactggcacaggtgagtactggaaacaaactgagtgagtccacattactttcattatcctctttaaaatgtgtctttccagcatttctgggaagagaaaaacaaaaccagagaaaattcatgcttctagggaaaaggagaggaaatagatagtgcaatagcaagaatgagagtattaatgacaggaagtaatgtaatcctaaagggattagtgaactaatgcttataaatggctcaagtgcctgggccaaatgttctatgtgagaggagctactcttctgttactttctctgagctcattaacaaccaaatggattataatgggcttcaacaggattaagtgacaatcaacaatcaaagtaagacaagagtttattatgaagaatattgtgttcaaagattaacattaaactcgtgaaatatattgtagaaacttcagattacattttgctatgattttctttttatatgtcagtcttcattcctccttcagaatgctctttttatgatgatttgtacataattatttttaggaacccattgatcaatgtcctagtaatatttcattcttttatatcatcttttacaataaaattaagttgctttcagactaatttaaaaataatctttggggttaatgttttgtttccaaattatgaaaaaggaaggaattcaatcaaatattgcattctattaccaagtggattttaagtaccatatgctgtgttttatgccctatattatgtagtcagaatgaaaatgtgctccatgttttcagaatatgtactaccttcatctttcacattatttcaaatagtgagaaaataaatatacatccattcttcctcctactttctttccttatatttatctcccaactagccaccagacattctctctacatttaatacctacaaagagggctggctgctattcaggtcatctggcaagtatcatgttttctccagtatggaaaaactaagacatatgtgttttgtttacagtgtgccaaatgtgccaattcaatgagtttttggatttgttggcaaaaaaaaagagagagactgaaaaatagggaacagcattttttcctgtggccagtggtcatttgttggcacaaggaatttctgtattataaatgacactcaattctctctttgatggcctcactttgagaacagattttgaataaacagatcttaggcacacagaatttcaatcgtcgaggtgtatctgcagaagtaattagatacttgcaagtgacttttaatcacttcaacttgaatccatgtgttgcaaaaagatgtactagctaatgtgattattccaggaacatctaaaagttttcactgagtaacttttttttgacatgacaacttcttatcgtctcgatcttgaagcattggcatccagataaaggcacatgctggcatggggaaaggggggggggataatccacttgacaactggtaaagataatcatatttttataatttttgataaataaattaacttacaagccttattatgactctagtttcttctccctttaatcagttacatctattactgccagagtaattgttctatttcatatattttgtcatataatccacctcctaagaaagactgttattgtttacagattatttctcttcttaggatgacacacaggtcctttcacatgtggtctctacttggtctcccagactcagctagcctccatgagtatttcctagtgtagccatattcaacacactccctgctccctgaggtgcccatgcatttttgcccatggtctttgtcttccagtagcattgaaggagaaagaggaggaggaggagcggaaaaggagtggggagggatgaaaagaggaggcccagagaagaaatgagaggaaagaaatgtccaacgaagggaagagaaagaaaggaagaaagagagtgagagacagaatttctccacatttctcaagactcacctcaagtgatctctcctcttcaagccttccctaaatcccctgacagagagccccatgccaccataccttatgctgtgtcaccctctagcaaatttacatggtataacaaagcatgcttatctttttctccattatagattatcagaaacttgagagaagggtctgagtcttgctgtctctgtgtttcccatcacctagtagtaactagtccaaaactatttttttgaaagaaggaatgaatgaaacctgcaaattaattaaaagcgagagaacaaacaaaataaaatagatttgttcaactctgtttgtataatatgaatagacttctaaattagtctttctagttggtaaattggaggaaaattaatgaacctgaaaaaatgaaaagtaggtgtcacattataagctttctgagaaaatgacttgaaccttttatccttgtgttatcctcctttcccggcgctgaattatcttctaaaatggtttgctcaagtagaaagttaattaatttttattaagcaattagaagaaggaaagcaattttcattttcaagtaaaagaattcgaaagaaacagaggagatgactaatcattaggaatggcttagacgccgaatggtttcccacatataccaagataaaaagaatgcgcaggaggaggatgatccatggagtaatataatactgtcagtcagggtacagacaggaatgtctgccctgtcagctttgatcataccatatggggactggaaaaggaaaagatggtgcttttttacacatattctctagcttccgtttatactgaaaagttattgtaaagagaataagcagatagtttccatggttggacagcctttgtaagttttgcagatttttattgtttttaccaacagtgacatgcttaattcttcaagttgccacactcaactgaattgaattttagtgttctgttaactataaaatataatgattcatttttcaaagtttccctgaagcacatcagttcaatgacatctgtaggttaagaggatgccttatgattcagatatatgagaattcgaattcagactctataattgaccttatctgtgatgttggacaaattaaattttatctttaaagactgtttttctcagatataatatagaggtgaataacaaaaatttaaaaatagctggaatagttggatacatgatatatgccagacattctttcaagtactttatagaaatcaattcatttaattataccaataagtttatggtttaagtacaatgattgcacccattttacagaggacagaagtgagaactagtaaattatgaattatttggtaaatgaagtgtatagcacagtgtcttgtgtacagtaggcagtcactagctggaaacagatattgcttatttcttcatgtattagtctggattctccagagaaagaaaaccaataggatatatatgtgtgtgtgtgtgtgtgtgtgtgtgtgtgtgtattcctttaatatatgtattctctaatacctttatatattatatatataatgtagatagatataggaattagcatatgaagttatagaggcggagaagtttcaggatctgtagttggcaagctggagactcaggagagccgatggtacagttctagtgtgagtctaaagtcctgagaaccaggaaagacaatgatttaagtttatagactgagtgcaaatatgacagcaggggaagactgatgtaccatttcgagaacagttgggcagagaaagcgaatcctctcttattctgcattttgtttgattcaagcctccatggattggatgaggcccactcacactggggagggctgtctgtattactcagtctgttgattcaaatgctagtctcattcagatacaccctgaaagatgcactcagacataatgcttaaccacgtgactggacaccctgtggtccagtcaagctgacatgtaaaactaaccatcacaattcattatggcaatttcaaagaaggaaaacattggcgaaattgtttacaaatgaattctcaaaataaatgttctaattatattttacagagacacagggggaaagcacaaatgatgatggagtctggtttatacttcacacacagaaaacattcattcaatgaataattgagatcatcagttaattagaggtggatatacaaaatttaaaatattgtgacaggtaattgaaaagacaaagtataagaagcattaaaatgagaagacaatttaggaaaagtaaagccggggatatgagggcaaagaatgtaaaatcagacaaatagacaaaacatacattaaaatttgtttaatacaagttaaaaaagaataaaaaattattcttagagtaataaatgatgactgcacagaagaaatatctaacgctagcattttatattttacccaatttcaatccattctcagtagcaccagtagttcacttttaaaacaacaaatctgccatctacattaaaaatgtcttagataatctccgctgtctaaatgaaatcctaattcctttgtactttatttaatgctcctaaaagtttttcttactcttcatttgcagcctcatttctggacacagttttcccaatatacaataaattctatccacaatcaacttctcataattttccggaaacacaatgtgtatgttctttctttctttatatttcttgtcttttctagatgattccattcccctttttccaactagtgaatcctcttccctagaaggcaagttgatgttgatgtgataataaaaggaatgataatgtcatgggaaagaagaggagaatgttggggattatagctctcttttattagttattttggccaatccctgtagaggatatcttaactgagtattttatttaattcttacagcaaacctcctttttgttatccatgttttattgttgtgaatgctatagcttaaagagattaaatgacttatccaaggtcacccagttaataagactattttactcagttcaaataccaaactgactttcctaagaactcttttattaagaataaaaattttaaaattcgtaaagccctacaacgttctttttatattgtatctaattatatcagaaatatttacacatcagtctactcaatttgattttgattttcttgaatctaggaatgagtttcatccaccctgcttcccccatcccctgcagtgttagcttcatcacaagcagtttataatcttttatttaacataaacaaatataaaaaataaattctaagtatacacgagtgaaggcaacatactcaatagtacaaacaagaaatcaaagcgaattgcctttgtcatttaaaaaatttggaggaattaaaccttattaaaattccattaataacgttttctattaataattcccttattaaaatactggaatgtcaatagatacaggtattgaataaaactaagcacataatttaatgatttttcctaattattattcagggaatgtctttgaaaagagaagtgcaaaatatacaaaaacagaaagatcaagaagcatgccaaattggcattgtgattgccaaagcaaacagaacagtctgtaaattattatttagggattggggtggctcttgcatcagtcacaaaaagtgtggaaattaaataatatgctttaagaaatcttgtcataagagaacacagcatacttcttcctacatctatttttaaatgaatttcttatatgattgctcatgaagaggaccaatagtagtctttattgtttataaaccaatcaatatctctcagtctcaatgtgtaacctctctgtcaccattaagacagcagacggcaaaggaggggcaataaattttagcatgtaacagatgaagtagctgatagggtcattagagtaactatcagggatagagaaagctgtctcccaatatcagttcccacaactttgacttttaggttgcatttcttcataaaattcagcctgatttttctaatttccaaaattctacacttattttctattttatcttgtctctttttggatgcttttaaaaattattcctctaagtgtatacttggaaaaaaaattaatgtttctttgcaacttcaccctttgattgttatatatgcattcaactggagatgaagttgggttgaaatctggaattcaagattattttataccaaagtatatattgttttcaggtaatttttataatgtcccaaatacgtaactttttaggctttatttaattatagatatttggccgaataagcacaatcgaaagtttcaattaagagtctaggacacaaagtttggggaaaaaaaatcatagtattctaataatatgtattgctttgatgctgtatgtctaaaagcactcatgaatacctagtgcacatgtgtcaaaataaaacttttttttagagtataacaagttctttagaaaactttttgcatcaaatggtgtaaaaatgaaatcattttatataaatttagaatctgtaaaaggtacaaattatgctttgctcatcaattgtatttatttacatctaatcaaccccatcttctgtttcctactcaatattagctctattatttgattggtttggatatataggggcgtgttatcaaattatacgcacccttgtccttttcctcctttcataagtttccttcaaatttataattcttattacttatttaaatgaataatgatggagaattaataaatagaataaatataaaaagatattaatcatataatcgctcaacacattcctactgaattgattttaatttttgaagaattatcatattatattgaataaagaattagctctcaaataaatacaaataatttcttaggggaaggctgaggaggaagactgaatgagaaggagctttggcaattgggtgttaaataccatgggaaatagtcaaactcatagtagataagaatagaatgaatgatggttgccagggactgcgtgaggagaaaatggaaaattatttttcaatgggtataaagtttctgttatgcataataaataagttctaaatatctgatgtgtaacatagtatctatattaataagagagtattgtgcactttaaaatatgataagagtatacatctcatgttatgttcttaccaaacacacacacacacacacacacacacacacacacacatttattaccttgattttggtgatgatataatgggtatatgcatatttttaaactaatcaaattgtatatatttaatatgtgcagttcatgtgtatcaattatatatcaataaagctaaataatacaatggaaaattcagaataagacagagatggattgtgaaataatgttcatacattgtgttagtttttcttaggctcaaattggtgctaatttttttttattctgagagataaaaagctgaaggtttcagaatatcactaatgttttatatgtagttctgaagatttgtacaaacctctcttccccctttttaactttatataaaaaaggagaaagatcaatctgtcggtatgagaaaggaaaattataagttctatctggggatttactcgtcattaagtttgtatttcaatattgcaaaaaactcttggctatgattagagatattcatattaaaaattcagataatgtagactgttatgaagaagaagtttcaaattagctgaaataagtttcaaagtcagttaatttgttaccagcgggagaaagtcaccattatatttggcgtgtattcctgaagagcatacataagatagacataaacacaactacaatattggaaggtttgcttatttattttatagaaataatcattctgtataaaatttgagaagtgcttctttcttacagtttatcatgaccatttttctattatgatggttgccagggactgcgtgaggagaaaaatggaaaattatttttcaatgggtataaagtttctgttatgcataataaataagttctgaatatctgatgtgtaacatagtatctatattaataagacagtattgtgcactttaaaatcatggtagacatgatttattgtagattatacattttcccatcctaagaaatgcatagtttttgcttccattggcattaaataataattatgtataaggaataaatttaacataaacctcttttatttgcttattcaaatttatttaaaaatttgaatgtttgtacaaacctaaaagtagataaagtgagaagaatagcagccataaattttctcagaaaattacatgaaaacctaattaacagctggtgataacaatggtgaaactaacttcccaagattttaaaatcagtcatttaaaacttacactgtcaaacatcaagttcaatattcattttagtatgcgactctgcaatcgacaaaaatacatttcttttaatttatgaaacagaaaatatggttgttttctctatttcttctcttaagacattatttaatcatctgtatctttcttttattgatctcttccttttaaaatcttcattactcttgtcttttctcccagctagtccacttgctctgctttatcctgttatgatcttcttctaatgctcaaccaccattccaaaagggcttcttcataatttaaattaataatgtgagtgtgtgtagaaaaaaaagcgtagaagttttattttaatgtttttgagcaacctaaatgcgtggaagatgcatcatcacgcaattttaaaaataaaaatgatagattgatatattttaatttgtattacatgctatctgcttatgttcttcacatgttaatggctactgaaaataaaaaccattacaaaattctcttgaagcctttaaacagaagaaacaaccttgtaaaaataaatatttgtctatgtgtctgaagagaaccttcttccacagctgtgtggaagaaccttccacagagcataggtacatgttgcccttttttcaatatttaagatgttatatgtcatatttaaattgttgtagtattccaagacagtaaaactagtgatatatttaatgtgacaataatgtgttaatttttatttcaagacatcttgtatgaactactatttttgggaagaattcacctgtcctggattgctatgctctatttggaagtacatatccaaatatcagtcatttatctctattcctaaagtctagtaaatgcaacaagcaatctgaaaaagggaactgcagctgcataaaatgagcataattgattactaattgatatgcatctaatagagacttctttctacccctttagtatctttttatttattttgaataatgttttcatgtttggcccatttccttgttctttctccaccccaatctcccttatttatttaggtcaacttgacaaccccttttttttttgagaatgaattcgatgtcttaaaatctctctctctttttatatttattttagtttggcagcaaacattagttctcgcttgctatattttactcatcaaagtgttaacatcattcataaattattaccaatggtaggcactggttgttatcagtcaccagggaataattgatgctgattgaatcaaataaatgtggtgtttgtgaaactatgaccttgtcattcaacttgggtacaaaaatctattagatctatgagaactgaatcttaaagataactgaagaaggcagctttctattgacttaaacaaataaaaatgtctttttatttgaatatttctttctttacaatacatgatagtctaaagctctgaaaaacaacaataaaatcactgctaatctcccttatgtgagactaaatgaagggtcctgggaatattaattctgaaagaaagcttgtccagcctcccattttataataaactatatcaattcaaggactacacagagtaaattttttcaagttgtatagttctctggtttgaaagtgtcccccaaagtttatgtgttggaaacttaatcccgaagcaccagtgttgagaagtgggacctttcagaggcagagccctcatgaatggcaggattaatgccattattattgagtgggttagttatcatgagagcagattcctgataaaacggtaagttcaacctccttccctctctcactcttgtcttctcttgcctttccacctaaagccaggagatgacttagcaagaaggcctgcatcagatgctggcaccatgctctcatacttcccaacctccataaccataagtcaatacatttctgttctttataaattacctagtctcagatattctggtatagcagcacaagtgaactaagacacatagtgagcctttagcagaaccccattttcctaccaacctctcatgtcacctcccacaatgtgcattttcttttatttatactaaaagtgaccaaaaaaaaaagtttagaattgaaactatttccagttggtatcaagatccagatagagttaaccttaatatatatgtgtaaaaagctacaattcaaccgagtctctaaggcttcaaatatgaaaagaaataaaatgtgtttgttgttttgatttagccacaaatcagtgatttaatttagctactcttttccaaatgactatgaatttgatactgagtcagtgctttcatggtatgtccataggtgtaaaatgatggccttaatgcttataataataaggtaggtttttgtatgtctaatatacagagaaatttccaaagactttttaatctttgcttagcataaggagtttagtcagtaactattacaaggaaaaaatgatcagttttcatttgtcagttctataagccccaggcaagtttctttcggttttgactttttattaattaaccatatcctaagtgctaaaagccatgagtcatttttaaaatttatctttttttgtatgccatcacttctagttttaccactttgtactcacaaagaagccacaaatggattaatcattatgtcatctaaggaaataaatccatggcataggggtaaatttaaaaaatactttgtactaggattttataatagcttaaatttattgaagggctactgtgtcacaatcaacatgctcagcatttttcatgtgttattttccatttgtaactggcaactacttaggattatttagttaaaatcccttcctttatggaatgagatgtctgtttattacgtttacagccacattacagatctattgacataaactccaactatggtaattgttgctcctttttttccccctctctgtttcacctgctcaatgtttagcataatcaaggtgaacttttttagagaggcttgcttcatttttcacattgctatgaccattcctacagtcattgtcaaatgcagtcataaatcaaatatctggacataggagtttaggctaagtaagttacaaagttgttttggcgtccaaaacttaattgtataaatatctccaggggatggagatttctcccctgaaaatagagcacttggaacagaaattcagattgcttatttcatataatacaaattccttataaaacaactctttaatctacttaaaatccaatagcccattaaaattatcatcttatcttagaccccattataattcttgtctcattccttcctttcattctctctgtctggctttttttttttttttttttttttgctaatttttattttcttaattgcattgcatggatgtgtacattttgtttattctgttttgctttgctctgatcatgagggtctttatacttggaaataacaaagtgtaacttaaaaatacaaatatactttttgtgccacatttagagaccaaattcttgattaattattggatcaacatgagttctgggataattcttaaaaacttagtgtgtcatcatgagaaaatcaaggataaccattatcagaagtaaatgtgcaaccagttaaaaattcatatattataggccctaattttatttctctgtcacccaggctggagtgcagtggcgtgatctcggctcactgcaacctctgcctcctgggttcaagtaattctctgcctcagcctcccgagtagctgggattacaggtgcccaccaccccacccagctaattttttgtatttttagtagggaccaggtttcaccatcttggccaggctgatcttgaactcctgaccttgtgatccacccgcctcggcctcccaaagcactgggattacaggcgtgagccaccgcgaccagcctgaaatatattttaatttggttttgcacatcattaaattggtttcccatcatctttgactagcctttctatagttcctgtatttctaagttctcaacatggaaatcaactagttaggatacaggccggtcacctagactaccaatcatctgaacttgatttggaattgatcagtaagaaaaagcaggctccctgcagtgcttctaagttttgttaggtgaatggtcacaggatattttgctttcgctggcatcagttgttgtgagtgaagttcctagcatagaagtggcttttgtagtcctgaagcaggtagacattttctataaaggctctatggagtagaagttattgtttcaacagccagtttcatggtgtggtttcagccaacattcctagaagcttagccctgatctgggttttttagttctcccaataaatttatcagctgcccacacctttcattttttgccttcagttttattgtgctataattgacaattaaaatttcatatatttaagatgtgcaagttaatgatttgatggacattatgaaacactcaattaccacaattaagcttattaacttctatcacctcctgtagttactatcatctatttttgtgtgataagaatagttaagatctatcctcttagcacatttcaagtatataaaacagtatcaactatagtcatagtgttgtgcattaggtctctagaacttacccatctcacagaattaaaattttatgccctctgactgagagcttctcatttccccctcccctcagctccttggcaaccaccattctactttctgcttctatatgtttgatgattttagtctccatatataagtgagatcctagagtatttttctttgtgtgtttggtttattttactaagcttaatgaccttcaggtttatccattttgttgcaaatgaaattatgttcttcttttttaaaaattaacattttgttgcatttataaaccacaccttctttatccatccatccactgcaagacattttagttgtttccatattgtggctacttagtgaataatgctgaaatgaacacagttgtgcatagatctcttaaggaccctgattttgtatcctttgaaaatgtgccaagaatcaaggttgttgtatcataagatagctctatttttatttttgttttttatttttttttttttagcaacttctgtattgttttctataatggtcataccaattcacatttctcaaaagaaacatacaaatagcaaacgggtatatgaaaaggagctaaaatgaactaatcatcaggaaaatgcaaatcaaaaccacactgaaatatcacctcatacctgttagcttggtcattatgagaaagaaaaaaggtaagtgttagcaaggatatggagaaaaggaaacccttgtacactgttggtagaaatgtaaattgttacacccagtatcttttttaatacactccctttagctttaattaggtaaaatccaatattgttgcttgtagtcaagaattctggtatggccttcctcaaactgttattcaattaaaggacacccgaagatatatgaacatagaatgatgtatgtaatatatatagaagtcaagaaattctagcttaggtcctggctccaatgtgttcttactgtatttgagcaaatcaattaaattttggcacttcacttttcttgcatgtagaattgttttgagaagagaaatttttattttttattttatctttttttacaatttttgtgggtacatactaggtgtatatatttggggggcacatgagatgttttgatacaagcatgcggtgtgaaataagcacatcatggaaaattgagcatccatcccctcaagcatttatcctttgagttacaaacaatccaattacattatttattttaaaataatgaaaaaaatgcaatgttttaaatttctttttgttcttctcagtattttttaaaattcttgagccaaggatatatatttcatatttaaaagatgacttcttattcttgatgcctatattcttcagcaatgtataataagatcaaatgaaaaccaataattaaatgtcactactgttcttgtgtgcctcatgcatatgcattccattgtttcatggtattcgggtctgttttccttgcacaacttttcattgcgctagtcttgacttttttctgtcaaggaagacatctttaaaaggtacatagacactttataaaaagttgttccttctgggcacttatgtccataggcgaactgcttagcaaaggctcagtggcttgctgtattctggtagaatacagccctgtgcaagaatatagccagagtatagattgacattcggccacctcttattctctaagctgagttgttttgtgtagagaacaaatcacacaatcatatgaagaaggcttcttatatctacatataatacatacaggctgggcgcggtggctcacgcctgtaatcccagcactttgggaggctgaggcaggcggatcacgaggtcgggaggtccagagcagcctgatcaacatggtgaaaacccgtctccactcaaaatacaaaaattagccgggtgtggtggcgtgcacctgcaatcccagctactcgggaggctgaggcaggagaattgcttgaacccgggaggcagaggttgcagtgagccgagatcgtgccattgcactccagcctgtgtgacagagcgagactccatctcaataataataataataataataatattacatacatatatgtatttatctacattcacactttatatcagtgatgatattaaaattagacatttaaattaagtttggtaagtcatttcattttactagaatttaaattactgcctacttcttacaatttaaatatgttaagagactttggaaataattggaattcactaataactttatactgaaaaacattttcaatttgcccaaattgtatactaatgaatataatacataaggtacaaaaaaagtatacttaagaattacaaataattaccaatgttataaaatactatcaaatattgattacaaatttttcaaatttttggttcatcagcagggaaaatttttatcctctggaaaatctaagtatggatatgggttaaggtcctgaattttattattattctcactatcagttgttgtaatatttagaaagtataattaacaataatgcttaatgtatatctcccacttttttattgttcctagtactatattgagaaaaaaaaaactaataataaaatgggggcaagtactggggatttctctgtcaagcaaggaaatgcttttctcaagaaaaatctggaagtttgtcagtagaatgtgagaaaggaaagacagttggtatttagctgctgagctcaccacctcctgtgcttattacattcttaattgtttctctcttaccccaactgggttcatgatgcaggaccaaggatgtcaaagtagcactagtattttcagagcagtgcattagggcaacctaatgcctgatctttccatcctaatcttaaaaatgctcaaaccccatgtctaagcttttgctgttcaacacatcgccactagtcacatgtggccattcatatttacattcacattaaataaaattatatattcagtctgtcagttgtactagccatgtctcaagtgctctagtcgcctatggctatggctacgatatagggcagcacacactgaacatttatatcattgagggaagttctattaagagtcctgacctagcacttacttaaatgctaatttgtatttttaacttacagttccctggcatcttgcttgaaatactctggtgacatagtaaaggtctcattcccatactgaatgtgttctttccatttaatagttgccactaggtaattagtagtgtctcatgggatgacagacagcagagcacagcagtcacaatgttaccgtgttttagcctgtaaaccttttgacaaaggcacatgttcctttatcacaacttgtttgtcaaagtagagtaattaacatattgcatcaaatctgagataccatcaattgaaagatataccattattttgtattttcatgaacaattaaattaatgacattccatttggtctacagtctgcccaattccagagatgttaaagtgtgaaaaaagtgtgcaccttaggtttattgaaatttaaaataagaagccaaacttttactcatttccaaaattgaatcttattgcaacatacagaaaatgaagcaacttaaatatagaaaaccttgcttgttagtgtttcaatggattgagaggcttcttaaaatacttctctattcctttattcattttatgtatcttgctatattttgccccactctaactctcttgcttttgggtgttcagttacacatacgttagaatattttatattgctccaaacttttttcctaatacttcttctctttgtattttaatttgagtaatttccactaacctatcttcaagcttaccatttttttaatggtgatatcgaatctactaccaatcagtggcaatttatatttctgttttttattttttccatttccagcatttcttttttttaatttcttttttataaattgtttattttaggtttggggtacatgtacaggtttgttttatgggtaaattgtgtgtcacaggagtttggcatatagattatttcatcacccaggtaataagcatagtacccaacaggtagtttttttagtcctctccctcctcccatcctccaccctcaagtagaccttggtttgttccctttgttgtgtgcatgtgtactcagtgttcagtttccctcataagtgagaacatccagtatttggttttccgtttctacattagttcatttaggattgttttagtccattttcatgctgctatgaagcatatctgagactgggtaacttataaaggaaaggggtttaattgattcacagttatgcatggctggagagttctcaggaaacttacaatcatggtggaaggcaaaagggaagcaggcaccttcttcacagcgctgcaagaaagaaccaacaggggaaaccctcacttgtaaaatcatcagatctcatgagaactcgctcactatcacgagaacatcatggaagaaaaccacccccatgatccaataatctcccaccaggaccctcccttaacacctggggaattgcaattcaagatgagaagtgggtggcaacacaaagccaaacatatcaaaggttatggcctccagctatatccatgatgctgcaaaggacataatctcattctattttatggctgtttagtagtccatggtatgtatgtaccacattttctttgtttagtctcctgatgatgggcatttaggttgattccacgactttgctattgggaatagtgttgtgatgaacagacgtgttcctctgtctttatggttgaacaatttataatcttttgggtatataatgaataatgggattgctgggtcaaatggtagttctttcaggttctttgaaaaatcactaaattgcctcccacagtgtctgaactcaattacattcttaccaacagtgtataagcgttcacttttctctgcaaactcaccagcagcagttattttttgactttttagtaatagccattctgactggtatgagatgactggaagaaggtacctgcttcccttttgcctttcaccatgattgtaagtttcctgagacctctccagccatgcataactgtgaatcaattaaacctctttaccatctcattgttatatttgcttttctctaatgattagtgatgttgagcgtattttcatgtttgttagccatttgtgttttttctttcaaaaagtgtttgttcatgtcctttgcttaatttttaatatggttatttgtttttacttgttgatttgtttaagttccttatagattctggatattagaactttgtcagatgcataaattataaatactttctccagtctgtaggttgtttgtgtgtgaatagtttctttcactgtgcagaaactcttcagtttaattaaatctcacttgtcaattttcatttttgttgcaattgcttttggtattttcatacaatcttttccagtttctatgtccagaatagtatttcctaggttattttccaggatttttatagtttcagggttttcatttaactctttaatccatcttgagttggtttttgtatgtggtaaagaaagggtacagtttcattcttctccaaatgtcttgccacttatcccagcaccatttattaaaaagggagtcctttccccattgcttgtttttgttgactttgtcacaagattatagttgtgcagctttatttttgttttcttttacgtgttccattggtctatgtgtctgtttctgtaccagtcccatgccattttggttactgcagccttacagtgtagtttaaagttgggtaatatgatgcctacagctttgttctttttgctttatttctagcacttttatttccttctttcttatattatattatattcttttatttcattctgctgccatttcccatctaatcatgcatatgtcccaacttgtccactagattctttaacatagtaatcatctatatattaaatttcacaggtgggaattttaatatacagatgattaatatgttaaatatatgtgtcatatataagcttagttctattgttttatcttttgacagtgtattatttattttacttgcatctttgtgtatcttataattttggttagaagccatatatcttcagtacagtagtagaaacttattaaattgtttatatactttatccagaaattaccttttttttggtaagccctttattatagggagttgtgccaatattcaggtgctgagtgctatggtttgaatgttcccgccaacattgatgttgaaatttaattgccattttaacagtggagaagtgggacctttaagagatgattaggtcacaagggctccacttttataagtgaattaatgccattattgagaaagtgtgctcttgataaaagcatgaatttggcttcacttttctctctgtcttacatgctcattcaccatgtgatgccttccacaatggaacaaaccccaccagattctggtgtcatgttcttgaatttcccagaccccaggagcatgagccaaataaacttctatttgttataagttatccaggctgtggtaccctattatagcagcagaaaataaattaagacactgagtttctggtttgctgcttctggtcactctcagttcaccacaggcttccaaactctctgatttaccttatgtttaaagggtgggctggtctgtcaggtagtttctctcaatgtctcatccactctcaaattcagatctcccatgtgcacttctgtctcagagaaggtcgttctttccacactcttataattccccctggctgtagactgttttgtattactcaacactttctagcctagtgttggcagaaagggaggatgacatttttcatttttctgttttactatcagccttaggtaggaaagtatgtcatgagttttgagggtagaacccaatatgaaaatcctactgttcttttatcagtataaacttatttaataatctgtgcccagaatgtatttcaggccttcccttaggattttttttcttctatttctcctgagggtagaagtatttgctgctattttgcaagtggtataaagcttttgttctacagtaaatatagaaaaggatctggtttcttagactaggggaatatgtgttattgttactgttattgagtaggacattgtaacaaatgtaatctattgctgatgggaatgctattagcaaaaggtgtacatttggttttggctatcagttgagaagtaatctatagcaaataagtaaataaaagcatgatgttttattgtatttaagtgtttaaggtcaatagcttgatcttcagagataaaactaaaactcactattgaagagcatgaactagacagtcagattagttgtgtactgtagttaatagaaaggataagaatgcaaacgggaaaaattaaagtcaattcttagtcttcctgcgttaatttaaattgtgtttgcaagtgatttaaatactttcccaaaatgtcttaaggaaaacgacttaaatggttcatatagtcagaaagttcccaggtagttctagctcccattgtgacttaataatacatatctttatttatttttcttggtttctttttccatcattttggtcacacttaagacagatattctctgtggtggcaaaattgctccagtaatgtcccacgtctttccagatgaaagtgcagccagaaataatgtttgcttctgttccagatttgttatcaaacattgcatgatgcttattagctctgagtagttacatagccattgtatcagtcattgccaccatagcataatcaagcctctgacatggtatccctggcatctgagaagagccagattccttctaaacacattgacaaagagtgaaagaaaactatattccaaaacaatattagacatttttaggagaaatagaattaactgatgccagttgtctgttttagtcaattgggggtgctataacaaattaccacagatgggtagcttaagtaccagacatttatttctcatagttctgcaggctgggaagtctgaggtcaaggttctggaagatctggtatctggagagggtctgccttttggttttcagatgcagtcttctcattggatcttcacataacagagatcagagaataagcacactttcttgtttctcttataagggcactaatcccatcataagggcttccagctttatgatctaattatctctcaaaggccccatatccaaatatcatcacattggggattagggttttaacatataaatttggatggagaggacacaacattttgtccacagaagtggccaaaaaaacaaaaatgactattgtattcaaagatcattgatagttttcatttacttgatatttcagaaactcattttctcatccttttctagtattcatgtttctctagaattcaaagacatactggtctaatattaaactgtgttcaccatgccaatttaccccagtttttgtaagctttttatcttaggttcagtctaagagtaaaaagcattgtcttttattgtaggttgcaattttgagaggctaagttgtgaaagagcagaaatgtgactacgtttagaatcttcttttgcaactaactttacttttaagctgttttatgctgagatatatacctaccacttaaaatatctcaatcaaagtctacgttaaagctgccattctcaaataaggactatgtattcatttgtcatttaaaatatattctatcatgtaatcctttcagtcaattcatggggaagataatattgtctacttgatgctgacattgctctgatcccaatgataggccaaataaaagttagattaaaagacatctccctctgacttcaaaatttttgctaattttaatgtaatatgatatgtggatgaacaggcaaaaaattgagtcacatgagttttcatgttttagagaaactattggaaaaaaattgttaagccatgtttgagaaataaagaatattcctggtttctaatattatacaaacctcagttgattattttaaactagtgatgatattcagggcatgtctaaaaaaacactgggagtataactgtgttcatggttgatataattaattttgattcctgttttcattgttcataaaattataattttcaaagtatttgaattctaaatgttctgttttatccagtttttctttttaaattcatataggtttttaactgggtaaatgagtaagaaaaatatatacatttaatatttgagttctggtcttaaaataactataacagttttataaaccaagatgatattttaatttaattatttaaaaaatatattttttggtttgcattgacttactaaatagatttgcagttcagaataaatcataagtaaatgttctaacttgaactaggacttaaataaaaaattaaattaattcaaagttttcattcaaagtctagttttgtgctagttcatttggtagcttttagcctcaaatagctattgagcactggtagcatggctagtgctacattttgaaataacaatattttagatatgttacattaaataaaatatattattaaaataaattacagctgtttattttcagttttaatgtgactgctagaaaatttataactataattgtagcttgcattctattagacagcactgactagatcaatctgcagatctagaaatttagaaagccctttagattttaaatcttctaaaccgatgcctacaaaacaccaatatttaaaatcattttctttctcttagctaaccagcagctttgtgagaatttttattcagcatttctagagaccagcagctttgtgagaatttttattcagcatttctagagaatgctgaagtcactgaatctcaccacttgtgccccatctgtatttatgcaaatggaatagtgtgacaactgatatgtaaaacaatatattttattatgtgcatattctgttattcatagtgtattcaaaaccacttataaggcaaaagaactggtagatgagattgtctaccatcatatactcagtattgacagctgagaacagttttcagtagtagaaatatgtgcattttcttgagcataactagtggaatgttgaaaaagtagtactcattgaggaattatgccctgtatttgaaaatcttttagttattccattatagaccttggtgtgcttttgaggtgctcctgaagtgataaagtctttgttatgttggttggttggctggttggatggttaattaatttggtatcttggtgtcatatttcattagcagacacacttgtacaaaatactctatttttttttcctatgacctaatcaggtcattttgtttgtgcatcaagaggcatgatacccatttcatgtaaatcatttctagatagttagaacataactgtaaaaaatattgaaaatgaaggacaagggcaagaaaaaaatgagctctttaggaattagaacaattattattttcctacagatagcctaagaaaatgatgcacagttaaaagagactaactacaacatttaaaaatttttatcttgtccctgatgctttcgtttccttccttgattgattgtcatcatggcgccccttctttctttctttctttctttctttctttctctctctctttctttctttctttctctctttctttctctttctttctttctttctttctttctttctttctttctttctttctctttctttctctttctctctttctctctctctctctttctttctctttttattgagacaaagtctcactttgtcacccaggctggagtgcagtggcctgatcttggttcactgcaacctccgccacctgggttcaagtgattctcatgcctcagcctcctgagtagctgggactacatgcaagtgccaccacacctggctaagttttttgtatttttagtagagactgggttgcaccacgctggccaggctggtctcaaactcctgacctcaggtgatccgcctgtcttggcctcccaaagtgctgggattacaggtgtaagccactgcgcccgactatcatggcttatattttaaaaagtagttatgcagttatatataacaattaaaaccctcgcctacatagcttaatatgagtctctggaaaattttttcctctactctctctccaaaacagaacaatcattaatgatatagtttgggatttaattgatatcctttgttatactgtatttccaatgcagccaaatgcgattttattattcagctggctatcttttattcaatgtcaggatgagttaatcactttctttctaatagttaccacatatcagtgagttaatgtcatgatgaatatatccagaaaggaataacataggctaaaatagaatattataagaaatattctctatctgcctgtttcacttcaagtattataatattgaatgcaattgctaattaaaagtttagggagtcaagacatgcctaagagtacccagataattgacctagataatcctaataacaagttaggtgccttaaccaagtcattgaaagaatcgtatttcttctgtccagtcgtgtgtcagccactagttgttaaatatctcctgatacatttcttaattcctcactctgtttcctaaactgttcggtatgtatttgttacctggactctaaagtttctttttgtatggactaggtgtgatatttcaaacctgtgctttttactcatattttgggttctgactgtgatatagcactgggaggagattgtaaaacatctgttgagagtcactgccttatctatagtctgaactaaaaatgtctctcttcagatgactccaagagttcatatatttataaattgtatctaatgatttttatgattcggaaaatttgaagaacgtcagagtacactttaaaaatggaggaaagtggccaggcatggtggctgacgcctgtaatcccagcactttgggagaccaaggcgggtggatcacctgaggtcaggagttcgagaccagcctgaccaacaaggagaaactctgtctctacaaacaaaacaaaacaaaacaaaacaaactagctgggcatggtgacgcttgcctgtaatcccagctacttgggaggctaaggcaggagaatcgcttgaacctgggaggcagaggttgcagtgagccgagatcatgccattgcactccagtctgggcaacaagaacaaaactccatctcacaaaaaaataaatgagtaaataaataaataaataaataaataaataaaggaggaaaggaaaatttggagtcataaaatcagttttctagtgtcaacatggcttttggaatcaagcacaagtgggcacagaaataaagaaaacaggcctacatacttcatgatgtttttttttttttaagatttttttcttatttttcttatttttgctgtaaatcgtatgtactctctccaccttgccggcagttacatgcttgtgacatgtatccttcctaagagggaaaaaatgttaattactgaacctcagattctgatgcctggtctgatttatagtttatgggtgatgtgtttggcattttcaaggctcagttggttttgttgagcttcaggactgaagacttggtcccttaaagaagaacattctgcttttagtaataaccaggttaatgtgggccacatgccagtccagctgaatatgcatgaagtgattgaaattgaaagtcagttccttacatgtttgagtttcatgctatgaggaaccttacaaatagaggtcagagggatttttatgttgaaaatcagtagagtgttacctttgctatggaagaaaacaactttcttccgatattaatgtcagcattagagtaattgctctgtgaaactctgtctctagagttccattctctcttgaacaacaaatctttatcatcaccttagtattcaggtcatttttcataagtagcacataaagaacacattaatctttatagatgtctgcctatatttttatctcaaggttagttattgtcaaatattgtcaacccacagccttttcctttgccaagagttctctattaactcctccaataacctcccatcttttaaaataaaaacattgattttccctcaaagatgttatcattacctggaaactgaggcaaacaaagttaagtcatgtgttcaagttttcagtgtaaatgctgaaccagacacacaatccacacatatattttaatccacaaactcactattaaagttataatgcagactttgacgaatatgacgagcaacatattaattaaaaacctgaacaagtaaataatgttcatgaccaatataaatggatgctttaaaaaaaaatgactcaaacagatgtcatcaagatggcttactagaagcctctagcactcacctcctccacaaagaagaaccataacagcaaaccacacattgaataggatgtttaagggagaacaatgaaattcagcaaggaagtgatgaagaccgtctgaggcatggaagcttgagatggtagcatagagagggaagcaaagaatctggccaagattggctcagagccaagaggtactccccatttctgagaataggtgagtggggaatgccccaaagcccacattttgacaacagatacctgcaattctagctatagtagagcccctcaggcctcataggccctaagttcaccagagggagttgcctggagttcataggattttattatcccagagaaaaaaaattaatgctagatcaccttcactcgttgggacccaggttattgcagcacaatgccattttgagagcatggtcaccatcagagtacatccttccctgaggacgaatagcccctgcatttccacatccctggggcctgacatccatcccacatccattcagagggttgcagtgttgcgccaccagctggacccaatagttcagccgtgactgttgtactgaagcacatgcaggaccctccatcctagagtataaatagtctagcacagtgaggaagctttcccccggacggagaaagctgacatgcatattccccagagccttcaagccaccagttcaaggcataacaccacaaccagcaattacatttactccagcagcagagatgccatgaacttgtgcatgtacttgaagggcctgaaggctggtctgcctggtatccccacctctgagcaaacttgtgccatggcaaataatcacagaatggccaccagggcacttagagacactgctgacattgattaccaaataatttttatagagactatattactgtgcccactcagaaccaaagccaaagtattttatccaagtaaaactgtaggacacacatagagaaaaagatctttccctataaaagctacttcataaaactggaagaagagattgttccaccagatgcacagatattaacataggaataccaaaaaaaatatgatttagaaattcaataaaaagatagctgtattaaaaaagaaccaaacagacatattaaaattgaaaaattaaataaatacaataaaaataagtgcttcatcaatagactaaattaagtagaagaaagaatttctgaacttacagacaggccttttgagataaatgcattagccaaaagaggaaaaagaataaaaatgaatgaagcaggactacgggacgtataagaggacattaagaaaacaaatattggaatcatggaagttccacattaagcagagaagaagaaaaacatagaaaacctgtttaatgatgtaatagctgaaaactcaattcttggaagatgtgtggcatgcagataacaagctcaaatatttccatgtagatttaacccaaaaatgtcctctctgaagtacaataaataactatcacaagataaagagagacttctaaaaacagcaagaggaaagcatcaagacacctatgaggaaatgccaatcagagaaacggtaaatttgttagtggaaactatacaggtcaggaaataatatgataatatagtcaaaattcagggaaaaacagacaaattaccttccagccagaaatataacactcaggcaaaactatcctttagaaattaaggagaaataaagtgtttcccaggcaagcaaaaattgagggaattcatcaccactagactggtcctacaagaatgcttaagaaagtcttacatttgaaagcacatgggcaatctctaccattataaaaacatataaaaatgtgaacctcactggtagaacagataaataaatgagaaataaaacagaatcaagttaaatcaatatagaaaatcaacaaactgcaaagataagcaataagagaggaagaaagaaacaaagaatttgtaaaacactagaaaacaatgtaaaaaatgataggagtaagtttttcccagtcaataactgactagcatgtaaatgatttaaattccccaataaaaagatacagaatggctgaatcgattaaaaaacaagactcaactatatgctgcccacaagagactcacttcatttgtaaggatacatgtagactgaaagtgaagagatggaaaaagatatttcatacaaatggaaataaaaagtgagcagaaaagctatatttatatcagataaaatagactttaagtaacaaaaaaagaaacaaagaaggttattgtgtaataataacaagatcaattaagcaagaggatataacaatgttaaatatgtatgtacccaataccatagcatccagatttacaaagcaaatattgttagaactaaggggagagagagtctccactacagtaaaagctggggactttaacgcctgactctaagcatgaaacatatcatctagacagagagtcaagaaacataggtcttaaactgcacttaacaccaaatagacctaaaaggcatttataagtcattttatcctttagctgcagaagacacattcttctcattagcacataaaatattatttagcattaattatacttagagccaaaaacaagtctcaatatatttttgaaaactcaaaattatatcaagtaagaggaagcagagcataaaactttagaaaattttcagtctgatgatgcaatagaaaagaaaaacccattttctgaagagaaattcaagccagctgcagaaatttgcataagtaatggggagccaaatgttaatcaccaaggcaatggggaaaatgtctttaggcatgtcagagcccttcacggcatccccgcctgtcacaggcctggaggcttaggaggaaaaaatggtttcatgggccaggcccggggcccccctgctgtgtgcagccttgggacttggtgccctactttccagctgctcctgccatgctaaaaggggccgcggcacagctctggccattgcttcaggtgcaagcacccagtcttggcagcttgccttgcacatgatgttagtcctgcaggtgttcataagataagaattgaggtttgggaacctctgcctagatttcagaggatgtatgggaacacctggatgtccagcagaagtctactgcaggggtgcagtcctcatggagaacctctactagggcaatgcagaaggaaaatgtagggttggagccctacacagagtccccactagggcattgcccagtggagctgtgagaagagggccactgtcctccagaccccagaatgttacatccactgacagcttgcaccgtgcacctggaaaagctgcaggcactcaacaccagcccatgaaagcatctgactgggggctctactctaaagtcacagtgggtggagatgcccaaggttgtgggagcccacctcttgcatcagcatgccctgaatgtgggccatggagtcaaaacagatcattttggaactttaaggtttaatgaatgccctcttggattttggacttgcatggggcctggagcccctttgttctggccagtttctcccatttgaaatagttgtatttacccagtgcctatacccccattatatctaggaagtaactaatttgcttttgattttacaggcttataggcaaaagggacttgccttgtctcagatgagactttggactatggaattttgagttaatgctggaatgagttaagactttggaggactgttggaagggcatgattgtgttttaaaatgtgaggacatgagatgtggggggggtgcatgggtggaatgatatgatttggctgtgtcccccacccaaatcttgtcttgaattgtagttcccataatccctacatgtcataggagggacctgatgggaggtaattgaatcatgggagcagttaccttcatgctgttctcatgatagtaagttctcaggagatctgatggttttatagatggtttcaccccctttgctcagcactcttctctctttctgacttgtgaaggacatgtttgcttccctttccaccatgtttgtaagtttcctgaggccttcccagccatttggaactgtgagtcaattaaacctcttttctttgtaaattaccaagtctcagatatttcttcatagaagtgtgagaatgaatagtatggaatcattgtaagtgtccatcaccagctgaatgaattaaaaaattgtggtataaatatacaagggaataatatgcagctattacaaaataataaaattctgttatttgcatcaacatggataaacctggaagacattatattaagtgaaataaattaggcacaaaaagataaataccatgtgtatcacttgtacgtgggaacaaaaacatttagctcacagaagtaaagagaagaactgtggttattagaggcttgaaaatgtaggagtaagagaagatagaaagaggtttcataaaggatataaaattatagctagaaaaaagaaggagtcctagaattctatactacctcgggcaactatagttaacaataatttaatatatattttcaaaaatcctaaagagaggattttgaatggtcacaacacaaagaaataataaatgttttaggtgatgagtatgctaattacacagatttaatcattacatattatatacatgtataaaaatatcacattgtattccccaaaatatgtacaattttatgtcactcaaaaattttaaaattttctaaatgacaagaatattttaaagatctctaagtaaaaagttttaaaacatttttaaataaaatttttattcaacaatatttaatatgcttctcagtttaactagaatttaataagaataagatgttttaagtagtcaatatttagagtgtgtatatgtaaccaaaatatgaaaatgtattagtattctttacaattaaatgtgttttaaaggtgcaatataatccttgtaaggaaaaggcaaacaaataaataagtccacaattgaccagtaaaagacaaattatgtatagaatgtaagtataacattcaaataaagaaaaatgacaaattacagaacaaattgcattgagcaactttctggttacttggggaataaaaaacaaaagtggatgtatacctcacaccgtaaataaaaaataattattgcttaatgaagagatcataaattttaaaagtactagaagaaaaaagtgtgtgagaacttacaatgttaagctagttaagctacttttggcatgctacttaagtatgagaccataaaggaaataacttttagagtaaacatataaagttttaaaaattatctgtggaaaacacacaaaatgaaaacacagatgctaaatagggtaaaatgtttactacatacataaaaacaaagttataatctgtcatataaaaagagcttttagagatcaataagaaaaagatgaatgaattcccaagaacaaacaggaaaaagacactgatatataagttatgaatgaagaaacacaagtgattacagcttatgacaggatattcaagctcaatcataaactacaggtctaaatgatttgttgttgttgttgctgctgtcattgtcattgtttttccttgaaataatttaaattacctcaatggcaacatgattttattgtgactttgaacaaagagagagatgcttgtgtagcatgtaggactataaattgttttagccgtagtaaaaaatgactggtaataggaatcaaaatgtaaaatgtgcatatcttctgatctacacattttacttttgagaatatatcctaagcgtatgcaaaatatgtaataaaaataattttagagttttttatggtatatggaaaatatgaacaatctaaatagctattaataggtaaatacatatattataatacttggaatttatatttattaccatttttctaatatttaaaaaatcatttaacacaggtatgttaattatgtatgagggtatagtgttatgcaaagttacaaatacaaaatcaatacaactcattttaaggattttctatctctgcttggtagtaaaacttttatggaataagttaacaagttgcaattgaaatagatttgagcttttctggttgtaatctcttgggcttagcctcaggtaataaccaaaaaatttccatatatttttgtcctttaatcctcataataaaacatttggatatatattattttctctattcccttgatgagtgaattgtggtttttttcccctttctttcttttccttccttcctgccttcctaccttccttcctttccttccttcctttcttcctttctctctctctctctttctctttctccttctctctctttctttctttctttctcttccttccttccttccttccttccttctttcttcctctttctttctttttcttttttcttgtaaactgctaaggaaaacacaagctaagatttgatcctattgaaatgaagacaaccttttctccaaagctgcttggaaatgaaatgaccacttttcgaagtcatggtttattcagttaacaagggcttgtaatttcctatgtgttgaaacaataattttcatccttacaattctagttccagcactaaatggaagctaggttgggagtttggctctctgtcctattgcaatatatttatttctgcatggatatgctagagagaaaactagtttatagctagtgagacaatgtttaagcttatttcgctataaatgaaaaatcgcttgtactactttcagtaattgattttaaatgccattcaggttatcaaaccagatattttcaaatgatgataagtagaaaatagtttaatgccaactgatgtggaagttgcttatttgtgttaattaatgaggagaggtctggtccatgaaaatattgtattacaaacagtggcattgtcaatgaggctgttagtttactcaagagtgtagtatggtgaaagttacatgttaaatatcaattactgaaaaatggaacatctttgaaaaggaattttgcactatagaaaacgtcgcaggaactctaagagcaattctaagagcaatttaaagaaggtttttctataatataataagcttatttatataacagggaatatatcagaaaatgatttattctgcttgctcaaagatctcctttggggtaataaagtataatcttctggtattagctgctattaatacataggccagttgaattatatcctaggcagaatagccctacatgcaattgaaaaatgttgtccaggtgatttttggtatgcttttaatatttgagtcatcagccatccattgtctaaagtaaaataaatatatcaaataaaaacgtgtacttcattcatctcattaggttgtcagcatttacagtcagagagtatttctgaaagtattgtatttcagttcagagggaatacactataaattataaaattgctgacacagtatctaattcttttccactgtgatgcctactagacccaaataaaccaaagaaaagtataaatagtactttattatacatcttgtgtggggaccgcatcatgctgcctataacagaatgaccaaattggttttgtgacggtcagttttgttttgctttttaattagcaagtttatttttatgttttatagattttgtcataaatacagcctaattaacacctataaactgtgacatatctagactatgcaatattgtttactgaaaaagagatgaactatcaaggcatgaaaacacatggatgaaatgtatgtgcatattagtaagtgaaaaaagccaatttgaaaagtctgcatactggatgattccaactatatggcattctgggaaatgcaaaattgtggagacagtaaaaaaatttagcatttgctcgggattaggatggaagaagggatgaactcgtggaacacacagaattttggggggcaatgaaactatgctgtgtgataccgtaatcatgaagatgaatcattatatactcatcataactcacggaatatacaacatcaagagtaaaccctagtgtaaattatggactctgggtgacaatggcgtgttgatatacgtttattgattgtaacatgagtaccactctggtaggggatattgatagtggagaggctgtgtgtgtgtggaggcagaggtatgtgagtactctctgtaacttccactctattttgctgtgaacctaaaagtgctctaaatgtgtctatttttaaaacataaaataaaaataaaaaacctgaattttatattcgtaatcttcatacttttagtctcaccaccttaagtattttactgtttgccacttaccaaaatggtggtgcaattgaagaatggtacgtgattcctctatgttgtatcatagtaaagtcatgcttgcatttttttctttcttattgtagtagaaaagccatggatttcagaatctgtaagatcttagttccaattctagttatactagctgtgtataaacttatttcggtataaataaaaaatcgcttgtactactgtcagtaattgattttaaatgccatccaaacctgaaggatagaaaatatccttttaaggttataaatctatccaaacctgaaggatagataatatccttttaaggttatagtgaacattaagtaagaaatattttgaagtagtttaaaatactaataaatattaagtatacttttaatactcatatatattttccttttcaatcaatacttgtttttcgatgttcacaaagcttttgttaaaagggcaatgttttaaaaatatttctgtagagctgtagtttatcattgtgtgaatcatattacaacactagagtctcctagctcatagctaggagctagttagttcgtaactgtgtgaagaagataaatcttttgaaacgacaaagtcacgactcactcatcttaaaaggtatctcattatcctagaacaaacttggcatcattgtattactgacttccaagagaaaccaatcccattttgcctgtattgtctttcctcttaccggcattttttaataaatgctgttgacacagtagcttgctttctcacagttcagttttcctaactgtttgattccatggcaaatccataatcctattttaaatattctccaggccatgaaaatgaatgctatttatatcaattcggctgttcaactgcagtgcagaaaaagcttttgtatccagagatacaagcctctggttcaagcataaattactgggatacactgctcttttttcttttaagctgaactctccttgacacgaatccccataggtgtcttaggtaataactgatattccaagaaaaaaaattgtgaaaaacagttaaaggaaaagacaatttacatttttaatctgatagatcatgtttccaaaatgaaatctctcttaactctggtaatcaattaattcatacatatttccatcaatagatctttgaatagtggcttaattggtcttttggaaatgaatcatttgcaaagctagagtcgtgcttcatgtactagctccctgaaaggtagtgtgcagaaagattaaatcgcaaagtggattgtaatcaggcagatcttggttcagattgtgactgtttcctacttaaactttcagttttaaaattgaacttggcagagcttattttatgaagtatgaataatatttacttcttgagtaaataaatcttgaggttgatttaaatgttaagtaatataatatatgtaaagcactatgcagaatctggtatgtagtgaaagctaaatttgagttattattatatgcaggactatcttaagtttgacacactagctgtatttttctaaactgtataaatcacttcgactaagtcaactagtatatttctatgacgtactcataaaaccaaaaagattaatcatttcttggaaagcttatgaacttataatatgcagtcctaattgaaccatgacctacaacagagttttccataccaatgtaatgtttcttggccttgttgcaccgaatggaacataagctccgtggggacagagattacatttattttggtctttgtattttgcaagttacctcatttatgaacttgcacataattagtattcaatagttacataattagtattcaatagtcatttataaactgacaacatataaaagtaaatacaggttatcaactgacactcttatttatcttattttaaaaaactttattatgataatctttttaaaaatagttattgtggtgcctgtatcaaagatattaacagaaatttgttaaataaatgaatgtagttaattttcatttacagagcatgaatgccagaatttggataacttctgtactttccttgtgttcaaattctggcaggactaaaatatgtctgtttttcctttcttccaataatatctcatgccatgtttatataattaatacagtagattattatccataaattacatatatgcaaattcaactacatgctaaagttaacttgtgccccacaaatctactcctgggtctttcacagtcattcatagacatatgcagaataacagaacaattgagttgcttgttgtctactttcccagctaaggttgaacgaggtgacactgtgccttcctgtttcagctcttttactgtaaacaattatcgttttgagggtctacttagtgacatgtttttcacatttttgtgctttctgttggtcatgttcctgtttaaaatcacttcccaccagtcacttctgcccccaagcatagtgatgaagagttgtcctgtcttccttagtgcaagaatgctgtgatgtgccttatggagcaaacacatgtgttagataagcctcattcaagcgtgagttatagtgttgttggctatgagttcaatgttaatgaatcatttaaaataaggtgtctttaaacagaaacaaatatgaagtaggttataggttaaagggttcatgaaaatgttgtgaccagaggctcacaggaacctgatcctgtatttctcctaggagcaatgattcagtagttgctaattcagtgtttatgctgagaatacaggtaaaaacaactgcaaacaatgaaaattgtctataccacttgtagtagtcaactcttagtaatcaaactcttcttagggttcacagtataatatagagatgatgggtaccagattggattacatgatcttttgatgttttctgagtctcctaatacttttcttgatgggattgaatgattggatatcttaaggccagcttccagaaataagctgatcaagttttgatatggtatattggaattctgtccactcccactgccttttccataactattcacactctaataagtagtggaacatcatttgcagagatgggatgaataggtaatttttggctatgaaatttgcttgtccccataggtctctcagatgctcagtttggctttcactgtgcagcagccaatcattacaggaaaaactgttactcttcctaatcttaagtaactttgattttaccctctcgtcatgaaataagacctacttagccgtatggaaggggagtttaagataaaggaaattgaggaatgttaaaaaagagtagaaatgttatccaaggaaggagagagaaagagatgcagattagcacagggtgaatttagaccagaatgccttaatacagatgttcagtaaagctaaatctaattctcattgaaaatcccccctccctttaaaatatctccaacactatgtcaagaaagagagaaagagagatagaaatttcttcttccaaccttgttcaagattttgccctcccccatattctttattctgttgtgggcaaggaatgtgatttttcttattgaaagttaaaaaacaggaagtatttgagatctgctgggaacacacacacatgcataaaaagatagtgaatttggaggaaagtgttctaaactcagagtaaagggctaggttctaattatctgcagatggcaaattgctggctttgtaggatggatggatggatagatagatagatagatagatagatagatagatagatagatagatatggatgaggcccaagcctatatgttactgcattctgctgtgggtttgcagacaagtctagtttaacttctttattgcagtcttcacctcaacacacttactgcaagagacaatattgttatcaggctaagaactacagaacagaaggtggatttatatattcccttctccaatcacaccatttgaagacatataagtcctctggatttacaattagagaacgaccagcaacctctataaaaaatagtgcagaaagagaccaagattcaataattatacacagttgttaggtctcagtgtctgctttgcctaaaatgataatgcccagcaactttttctctttagatgtgtgcctaaaagccaggtacagtgtggtaggtgactcaaagataggatgaataccctctttccccccacgatatcatgacatatttgtcttctttgaagaccaagaactcacttggcagtttgctttggcagcagagctttctgagagagagagaaaaagagagagagagagagagagagaaaatattgacagaagtggtcacatttctcatctttttgtcagctctggtagtaaattcaagatttaaatttgtagtaagtatggaactttatagaacacaaagtaaatgtcaaagtagacaccaggaaaaattatttttgcttctacagccctatcacaaaggcaatctcagatttaatagttattccaaaaggagcgggagcataaagcttcattgtaaaacacaatactctaacaaatggtggaaggcttgcaatttcattgcaaagagagaacatagcacttctttgccaaatatgtggcaaatcatatttaattgaagctattattccagtgagaagaaataacaatttgacttctagggagttttaattgacagtattataatatttgtgcaatgtacatccactacaagaataaaagaagcttttacaattgcatactgaaaaatgaaagtatcaataaaatttctgtaaatcctggaaataataatatcacaatatagctagctaaagaacaattttcttcactagattcacatagcttagagaaaaataattttcacagaaatatactcatcatctctttccctaacccatcttttgtaattttcctaatttcctctgtattccactatttcatcatctcattattaagaagcaaaacatagaggcatttttgcattatgcactacagtcttttgtttgaaatttaatgggtcatgagttctgcagtccttgggaagatagtctttaaaaaaatggggatttttagatattacatacttgtagccatctgcttaatatgtcattttcaaccattactatgaaggtgtggagagtgttatctcacttcaacttcaccaacaaacacttcaacatgcattagtttttttcctatcagaaccatcactcaagaaataccagttgaatgcatataaacatggcactgtgctaggtaatgtggaggatgcaaaggtaatagacacctgtatctgacaacattctagtaggaaaaggagacttacacaaaatgtttatatagtttcactacagagtgagatgtgtcctaagagtcatgcaggaaactgtgcgagatggatttcagtagaagaaatcaatatgagctccatacgggggctttattataaggggtagaattctcacctcagttaaggtagaatgtccttgggggaaaagcaaaaaaagttcaggacacacagggagaatccatctaatttgaagtatagacgatgtaaagagagggagtgggtgataagtttagaaaaacatgtaaaagccaaaataacaaaattatttaacatcagatgaggcagtttgaactttattttacaggcaatagggcattagtgaaaattttgaacaagaaagtaacataatcacaattatactcaggatagagtggattaaataagcaatggaattgatattagaaagaaaaattaggcataaggcacagagagggtgataaacttctgagctagaatgttttatattttcatttctgcctaacaccaattcttggattacctggatgttactaagaatatatatacatatattcacattaagataaagctatgatcaataatgtttcttttttaatttcagatttttcattattcgtatactgcttcatatgtgatttacaacatacacactaggtaagttctttgattttctagttttcatgagcaattgtgttactaaattgttggtgtagatatcagtttgttcatgtaaaaatattcacattttttcaagggaagtttgggagttaaatcctccagaagtagaggactccgtcttgcagtacgcggcctggggtgtccaagggcagcagctggtaagcgcaggcattggtatgcactgaacactgccaatcatggttttatggaagatgttaactgaaactttggaaaaaccataggaaaacttgtcctacaaaactttatgtttccctaagtcctttatatcttttatctaatagtccaacttaagaatacattaaatgatactagtattattttatcagttaataaagacaaaagtttattaagtaatatatgattaaactgctggtttataatgaaacctagaagagattcaaggttactaggaccttgtactgcatactttccattacataatattgtcagttttcatgaaaaattcaaaataaagattattttttcttaaagcattgttcagggtaaaaatttagacagaattatttaatattctcttaagagaggatttttacttttatttttattttgaaattattacaaactcaaaaagataattattgatatataaagcagtttgagcaattatatatatgtgtatgtgcgtgtttattttaggcaaagtcttgctctgtcatccaggctggagtgagatctcagctcgctgcaacctctgcctcccaggtttaagcaattcttgtgcttcagcctcctgagtacttgggattacaggcacatgctaccaggtctggctagcttttatatttttagtagagacggggttttaccatgttggccaggctgatctcaaactcctgacctcaagcgatccacccacctaggcctacccaaagtgatgggattacagacatgagccagtgagccccgcctgcaatattatattcttgtacatatctcatggtgacaatgtaaagcctttctcaagggaatattgctcagggagtagtattgcttactatcctgtgcatgctcagatgtactgagcatcaccaaactgatttctaggttatttgttaagcgtgtttacacctaccagcaataatgagagcgttcccttggttccatatccttgccaacacctgtttttccagacttttaaataattacccaaatgatgatacaaaatagtatttcgttatagttttattaacatttagtatttccttgaattctaataagctagagcaacttttcatatggttactggcaatttgtattttttcatatgtgaaatatctattcatatatttgtccattcacattttttattcttttttttttagttaaaaggaaccccttatatgttctggatattaatacattgtttggtctatcttcatccagttttcggatttacttctcactctcttaatggatccatttctacaaacatatttttttataaatgtagtctgatttatcaaatacatgatttgtactttttgttattgatgaaatctttacaatgaaatcatacttctctagaatttttcaagtgggccttccatgtataggttcttgatccatccatctgaaattgctttttttggtatggtattaagtccctatccatttttatatatgttttatatggccaacaattgtcctgaaaccttttgttgaccacttcattctttaactattcatctgcagtgttacagtgttatgctgtacatatccatgagtcttcttccggctctttttttcttccaggtggtttgtctattagtgtgctaagacaacagtatcttaattaaaataagctttactagctgacaaggcagtttcatatgctgactttgactcttcttgactttttagcctttcatatgaatgtcacaattgtctttcatgttacatgcccattttcagaattttgaatttattatttgaatctatatgtctattttgggaaattaacatcttagtgatactgaatcttcatatctacaaacatttaatgtatgtatttagttatttaagactcttaatatctcaaattttacaattttatatctaaaaatttacactttatcattttggtgactcttttaagtgcttgcatttcttattttaaaaatgtttgctactggtaaatagaaaggtactcaaattatttatttaatatatatcaaccttgctacgcacaattatatattccaaataattctgtgtagactattatgctttttgttaataatgacatttttcttttccatttcaatttttataatttctatgtcgttaaaatccttctgcactagttaacctatgaatgtaactaggtatggtggggttttttgttttttgtttttgctggaatactaaaaaattgattctattatggttactgggttaagttttacaatttttttttagttagttttagttagtgactgcaattgatgagacatgctttatggcttgggattttttcaaaatgctttttatgtgatggataattttatatatgttctatatgacaggaacaatgttctatatgtgcctacaggatcaatcttaataattatgtttctaagagttatattttcttactaatgacagtggatatgtgatttttttctttagttgtcagttttgcattatataatttgaactatgttgtaaagaatgaggaagttataaaatgataaatacatctttctattgaattcaaatgttttataccttaataaatatatttaccttatttacctttaataattctgattggccaaccctcatcctatcctttaactagttcttttaacgtagtttagaatcctctaggcttttttaaaatttgaattgctgttttaacaacagctggttgggctgagttaagtttttaatttcctgcaagcctcaattttctcatctataaatagaaatatgtacaccatcatatcattgtgataattattttggaaaatgactatttttcataataagatgcacattactatgatttatatcctattttataaatctgtatatttcttaagcttattagtgaaatagggtaattataatagatatttcatatcatgagaagcctacagaataatacactgtggctaaataaggtttcctttcattggaaaataatctggaccctcaaatattcaaagaaatcctacaaacaaccctgcattcactgtcctttccacactaaatggttgaataattgagtaaatcattatgatgaaaaaaggttagtgatttaaaatgaaaaatgtctgcaattgtccagataccacagattatagacattatatttgcttttatcttgtagatatttagataaattaacaaacaatgcatttaatctaccatcacagaactctctgtaatctatcccactatgatatttctgaaaagtggcagcaaaatttgcatagaatatggtaaatatgaatgtgcagggtttggtctagataaggcatgtaatcaatgaaacattcatggacaatggtgagtggacaccaagaagtggcaggtgctctcatccttcctgtttcactctgatgttgtgaacaatagagctggtccattgggccagaagcaactttggaacaaaccaaattccagaacacagaaacccaagacaactccaccttttgtacaaaatactgcccagtattttagaaaaaaatggacagtattttggaaaatcttttacactttggttggttttaaatgaccctcttattcttcatacttgagggaaaccaacacctatgacaaaataatagcactttgatacactcagggaaatagtattaatgtatgcattttctttatttgttattgattccttattttttaatatatttaagaaaattatgaaaatactaaaaatgtataaaaattataggttccctgtttgaagccatattgcaggtgattacattctggttctactgcttactagctgttgatcttgagaacattatttaatcttgatatggcttactgtttccatctttaaaatggtagtgctttatcaatagtgctattctggtgtttaatgtatgaaatacagttctaaagcactttgaatagtatctggcctataataagtattttgtaggtattcacttttactattattaaaaaatctgttttcatatgaatttaaacaccttagggaactttagggtgactagttttgtggagaattaagcttaagttttctgtaatgtcatttttcaaactcctttggggaattcttaagagaaatttcatatttatctagtttatcttttgagtgcatgcaaacataaatttaaaaaagtaaaagacatacttctacaaatggccaatggtccatttcatatgagtttggcatgctttgtcaatatttgaagctattagcaaactcagcaatatgattttattagagatgagtcattacaatactttaattagttttgcattaaataaagaggcttgtagtgtttactaactaaggataattaattatccttcattttcagcttctaatcttatttgctgtaaaagaaattcctggtattatagaagagaggcaagggattgacataatttactgaggaagaggatctaagttagaactcagaatattgaggagaactttcaatagcactaagtgtgagtaaaggcaatttagatgtgtcaaaatttgtggaaaaatgaacctgaagcaataaagagtgcattatttggagaaggtggtgagtgaaccactttagctgtaataaagttttattgaatagaaatggtttgggaagaggaatctgggaattatggtagaaagagaagcaccaggaatctgtttttccattcagataacaattgctacagtagacatgtaactattgagaactctagtctattgaaagtgtgtaaattttatgggaaggcttgaatggaagtttgtggttaattttagttgacttgaactcttagctcagaagcagctacctatcttcgaccccagccccatggcaggcagctgtgcttatgttcctggagcatgcattcatcttgcaggaaccaggatggacaatgagggccctgtgatgcaaataagtaaggatttgtattcttattgtttattgccccttctcattatgaaattgcagatatagaggaaggcagctattgtttcacatccttacacccttataacaagctcctctccctccagctgaagtgaattctaaggtggttaaaaggccagtgccctttcctactcttcatttttctcttttttgagggatgtcagccattaaaaattaagatattcaaaggcaactgaatgtatgggagaaattagcaagtcaccatacatgcacagggaaagatgcaggcttacaaaagatctgagaagacttttttcacataaggctgattctcagcataaagacagcctccaacaattacaaaagaaccaacataacaaaacaaaagcaaaaacataaaatagaaaaccatgggaaatgggaatgtattagtccgttctcatgcagctaataaagacatgcctgagactgggtaatttataaaggaaataggtttaatggactcacagttccacatggctggggaggcctcaaaatcatggtgggaggcaaaggaagagcaaagtcacgtcttacatggcagtgggcaggagggcatgtgcaagagaactcccctttataaaaccatcagatctcatgagacttattcactatcatgagaacagcttgagaaaaacctgcccccatgattcaattacctcccaccaagtccctaccatgacatgtgggaattattaaaattcaaggtgcaatttcagtggggacacagagccagattatatcaggggagattctgatttccagagataccaaaattattagattcaaattgtctggttttcaacaataaaaaaattacaaagaatacaaagcaataaggaagtatggcccactcaaagggataaaagacccaacatcaagaaataatggaagtcatggaaaatatgaagaacatgatgtatgaacaaaatggaaataccagtggagagagagagagtaaacctaaaagacaccaaataaaaagttctagagcaaaagcttacagtaactgaaataacagttttactagagagtcaagatatacttgagcagggagaagaaagaagtagtgaaactgaagataagacaagtgaaatgattgagtattaggaacataaaaaataaaagactgaagaaaaataaacagaacctaagggacctatggaataccatcaagtggggcaacataaggattgtgggaatgttagaagtagaagagggagatgaaggggtagaaaaaatatttttaaaaattaacagccccaaatttgatgaaaatcattagtataaataaccaagagctcaaaaaatccaaataggatgaactcagagacccacaccaagacaagttacaatcaaactgttgaaagacaaagacaaagagaattttgaaagcaacctgagagaggccctcctcgcttgtcacatacaacatatccttatcagcagatttctcatcagaaacataagaagccacaagacagtgggctgatgtgttcaaaattctaaaagaaaaacaaaacaaatcaaaatctgttaaccaaaaatttcatgtctggaaaaactgtgtttcaaaagcaagggagaaattaagacattctcagataaagaaaaattgacaagagttaccactagacctgccctgcaagaattactagtgggagtccagcaggttgaaatgaaagtacactaggcagtgatttgaagccttataaagaaataaagatcccggtaaatgtaaatacatgggcaattatagaaatgtatgttattgttacaatgatttgtaactgcactttttcttttctacttaatttaaaaagctaagatatttaaaatttttagtctaaaagctaatattattttaactttaatttgtatttcacatttttttagacataatttaagaaagtaatgccttaaatgtcattagttaatacctttggatgtacaatatacaaatatgtaattttgtgacttcaataattgagggaggtgaggatgaaactatgaatgagcaacgtttttgaatgttattgaggttaagcttgtataaattcaaatcagcactataactttatgatgttgcatggaaccgccatggtaacaacaaagaaaataataaatatacacaaaagaaaggaaatgagaatggaattaaaacattctactattaaaaattaaactcaaataagacagtaatgtggaaaatgagggtaacaaaagataagggatatagaaaagaaatagaaaaatcacaaaagtaagttattccttatcagtaattactttaaatataaatagattaaattattcaattaaaagaaactaagaagataagttttaaaatataatatgattcaactacatacgctctataagaaactcactgtagatacaaagacacaaataagctgaaaataaaagaatggaaagagatatttcatgcaaacagtaagcaaaataaaataggggttgctatactatcgtaaaaataggcgttaaatcataaacagttttgagagacaaataaatcaatacagtaagaagatataacatttcaaacatttatatacctaataacagaccatcaaaatatataaagctaaaaatgaatataattgaagggaatatatatatatatatatatttctaccataattgttggtgatttcaacaccatactctcaataatggctagaaaaaccagagagaagataattaagaaaatagaggatttaaaaaacacagtaaggccaggcgcagtggctgacgcctgtaatcccagcactttaggaggctgaggcgggcggatcacgaggtcgggagatcgagaccatcctggctaacacggtgaaaccccgcctccactaaaaatacaaaaaattagccgggcgtggtggcgggcgcctgtagtcccagttactctgaaggctgaggcagaatggcatgaacccgggaggcagagcttgcagtgagccgagatgtgccactgcactccagcttgggcgagagagcgagactccatcttaaaacaaataaataaacaaataaaaaacacaataagccaactagacttagcagatgtatacagaacactcaacctaacaacagcgtacacgttctttcacgggcgtttgagaaattcttcaggatggatcatacattttgccacctattaagtctcaatagcttttaaaaaattatcacacaaaagatcttctctgatcacaatgggataaagttagaaatcaataacaaactgaaaactgaaaaatttctacatttgtggaaattagaaaacattctctcaaccagtgagttaaaaaattacagaaaaattagaaaatacttagagatgaagtaaaatgaaagcacaacataccaaaatgtatgagatgcagcaaaaacagtgtaagcgggaagtagctatatatacttactgctgtagaattaatggtgttcccacaaaatttatgttgaagccctaacctccaatgagactttgttagtttgttggagataaaagttttaggaggtaattaagtttgtacaagatcatgtgtgacgctttaatccaacaggactggtggcttaaaaaacagaggaagatctctcactctttctcttgctcttgctgtcactctctttcactcttgctctttgtctctctgtgcatactcaaaggaaaagtcatgtgagggcaaagctgccatctgtaagccagtaggagagctcttaccaaaaactgaaacatgttggaaccctgatcttggattctttagcctccagcactgtaaataaatatatttctgttataaactgcactgtctttggtattttgttatggaaggctgaaaggattaagacacttacattagaaaacaaaaaaagatctcaaatcaacaacctaattttacaactgaaggtactcaaaaaagaaaaacaaactaaacctaaagatagtagatataaacaaagtagataattaaaaacagagaaaatcactaaaatcaaaagttggttcttcaaaaaaatcaactaaattggcaaacctttagttagcttgactgaaaaaaaaaaaaacaaaaaaaaaaaaacaagagaagactcaaattcctaaaatcagattgaaagtggggatattatgaccgtttctacacaaataaaaaggattataatagtactatgaacaattgtataccaataaactggataacctagacgaaatgaagatagtaccaaaaatgcaaaacttcgtagtagagtcatgaagaaatagaaaatctgaataggcttatagttaatatggatattaatgcagtaatcaaaaacctcctggccaaaaacattctggaactgatggcttcatgggtgaattctactaaacatttttaagaaaacctaacaccaaggccaaggcgggcggatcacctgaggtcaggagtttgagaccagcctggccaacatggtgaaaccctgtctctactaaaaatacaaagattagctggatgtggtggcaggcacctgtaatcctagctactcaggaggctgaggcaagagaattgcttgaacctgggaggcagaggttgcagtgagttgtgatttgagatcatgccactgcactcctgcctgggcaacagagtgagactttgtctcaaaaagaaaaacaaacaaaccaatatttctcaaacttttccaaaaagtcaaagaggagaaagcacttcttaacccattatctgccagcattatcctgatacaaaaatctatacatgctacaaaaaacttacagatcaatttttcttatgaacatttatgtaaaaattctcaacaaaatactagtacaacaaattcaactgtgtaaaagattatacaacatagctaactgggattcattcttgaaatgtaaggatcattcaatatataaaaaactgatcaatgtaattgtattagtcccttctcacatcgctataaagaaatatctgaggatgggtaatttataaagaaaagaggtttaattggctcacagttctgtaggttgtacagaaaacatggctgggaaggcctcaggaaacttttactcatggcagatgggaaagctggagcaggcatcttcatgtggctagagcagaggaagggggtgagagttaccacacacttttaaacaaacagatcttgtgagaactcactcattatcctgagaaaagcacaaaagtgatggtactaaaccattcatgagaaacccactgccatgatttaatcatctcccagcaggcccctcctccaactttggggaacacatttaacatgagatttgagtgaggacacagattcaaatcatgtcagtagtatactacattaatgaaattaaagaaaaaaaacacataatcatctcaactgatacagaataagcatttttaaaaatttaacacccttatatgactaaaaaaaaacaacaaactagaaataggagaaaagtacctcaacataataaatgtcatcatgtatgcaaaatgaacggtgatcattatacttaatggtcaaagactgaaaatagtttctttgagataagaaacaaggcaaggatccttccttttgaaacttgtattcaccacagtactggaagtcctagcaaaagcaattaagcaaacaaaaaaataaaatcaattcaaatggaaagaaaaataaaattatttccatttacagattatataattttatttctttaaaagcctagagtccacacacacactcagcattttagaactaataaacacattcagcaaagtactaggataaaaagtcaacacagagaaatcatatacatttgtaagtctatacaataactgtgggcaatctgaaaggaaattaagaaaataattttatttacaatagcatgaagaaggatagaatgctaagaaattaactcagtcaaatagatgaaagactcatacaatgaaaactacaaaatatgtctgaaaaaaattaaaggacacataataaatgtaaaggcataccatgttcatgaattggaagatgtaatcttgttatgatgtcaatatgcccaacacaatctacagattcaattcaatccctatcaaaatccaaataatgtcttttttgcagatatagaaaagcctatcctagaattcgtatgaaatttcatagggcttcaagtatccgaaacatttgtaaaaaagaagaaagttggagaactcacactactgattcaaaacttactacaatgtatagaattcaaaatagtgtgacataaattaactgtgctggtacaaagacagtaatatagaccaatggaaaagaagagagagtccaaaaataaactttcgcatttatgatcaaatgaaggtgccaaatcattgaatcaggaaaggactatcttttttaaacaactgatactggaaaaactggatatccacatacacaaaaaataaactcttacctaatatcacattcaaaacttaactcagattggatcaaatatctcagcataagctctaaaactataaaacttttagaagaaaatataagtcagaagtttgaagatattggaaggaataaatgaattgaatcattttgcagtgctttcttggatatgacacaaaagacacatgaaattaaaaattgacaaattagattttatcaaaacttaaaacttttgtgcatcaagaacactatcattggagtaaaaaggcaacatgtggaatagaaaatatttccaaatcacttatctaagaagaggttaatatagaggaataaagtatacaggagttcttatatagagggattctaaaacgtaataaaaagaaagcaacctgattaattccaaaatgggcaatgaacctagatatcaaaaaatatgtaaatggccaataagttcatcaaaatagcaattcctatggaaagaagtttgatcttaatatgaagtggaaccttaggaattaaccattttcggtaggtaaacacaactgaatatagatgccttgatataattccatcgcagtaagtagcaaagtgtaagttaaagtgagctaacatttcatgcctatataatcatcaaaagtttaagtttgataataccatttactagtgagaataccatttactagtacacaatagggacatgtatatcctgccaaaggactactagtgacacaatgaccttgaggaacaaggttaatttccttgttcctcaaggttaagttccttgttcttcaaggtcaagtttgtagaacttagtcgtgttgaagaagtccatctctaaccctcagagagtgctggtgggcatttaaaatggtacagcctctttggaaaacagtctggtatctcctcaaacaattaaacagaaagttatcatatgatccagcaattccattcctaggtatatgcctaaaagttcccacaaactttgtacgcaaatgtccacagtagaattattcatagtaaccaaaaggtgaggaaaaacacaaatgtctgccaacaaatgaatggataaacaaaatgtggtatattcaaacaatgaaattattattcatacaatgaaattattcagccacaagaagaaatgaagcactgatacgtgctacagcttggatgaaccttaaaaacatgctaagtgaaaggagccagtcttctttcagaagtcaaatatgatttcatttatgtgaaagtccagaatgaggaagtttgcaggacagaaaggagattagtggttacttacagttggaaggattgagggatcagggagtgatagctaaagtatatgggacttctttttgagataatgcaaattttataaaattgactgtgataatagctgcacacatctgtgcatacaatacaaactataaatctgtaatttttaatgggtgacttgtttggtatgtgaagaataggtgtttttctaaagaaagaactggtaagtcctacaacagtaagttaggcattcagttgaaaaggcttgtggtgcaagaaggtgtgtcatttttctttttaaacaaatgtagccttataaaggtcagaattactcattgtagaacgttttgaaattgatataattaataaaaacagaaagtatacttatctataattgtatcacgaagaatggaataatttcaaaaatcaggtgaagggatttcacctttagaaggaaaaacatagtactaattagaatgaatctagaatcaagaagctcaagtccagattattttccattcttttccttactcattttttaaatttatttattattattattattttgctttgtgatttagggagagttgaaggctgtacgcttaaatttacttacattacaaatgaaagatggtcataactagttccagttttgtttaagttttaactgaggtatgtcaagtgtatcagttaaaattctccagaaaaacaaaaccaataggatatatatctccatatatatagggagagggagaaggattttaacgaattaactcatgcaactgtgagggctgacaagtttgaagtctatggagcagaccagcaggctggacaagtattaatgaattgatgtttcagtcttgagtcctaaatctgtcgggcaggttggcagttgggaaagttaggcacaatttcttgaagcagaattcatttttggggggaaacttcatattgtacccttaaggccttcagctgattggctaaggaccatccatattattgagaatattcttctacttaaaatgaattgattgtaaatgttgatcacatcgactaaatacctccacagcaacgtctagactagtgttttaccaaacaaatgggcactatggcctaaccaagttaacacaagaaattaaccatcacagtaggtatgacacttcacacagtgagaactcaagaaataatagctattattttgttcccacctgttctttcctacaaataattcacttaattcagagcctcatcatctttcacctagatattttagtagcttattttctaaaatttgttctcacatctccagtcattctaattcagccaccatccgcagaaatatatgttaaaattgaatgtacttaacagactcccacaaggttataaaatgtcattgaagtgacactcaatgtcattaatgtaactaatgtgacaactggtccatcatctgagctcctgccactccagcacagagcacatatttttctctacctgaaccaaactctttgtgatttctggatgaaagacacctgactcctctgtgtctctgagtcattcctcttggtagacctagccatttaaaaaaaaaaaatttccttcaaaagtctttgttaaatactttctctcttcttctctgataatttttttctaacccttactccatgctaagtgaatagttcgctttttgggattctggcattcctctctctcaaataatttttaatactatttatttatgttgttatcttctaccactaactgagggggaacacctagaatacaggatctattaaacattttttctctctcatttgtttttctcctcctccatttcttcctcctccttttttgtaaaatttactgtagctcaaggcaaaatgtaagtttaataaatttctggttgctttgagaaactgatgaaagacttattgttatttctgtgtaaaacaagaaaccaaaggttttgaggattgtataatatgggaaaaagtcatgtatgagaagatagatcttgtaaaggaggccatgatataccataagctattgaatctggaagcagggagctaggtgtagaggccatcattataatctggaactgcaatgataatcaaccatatatcaatataacaagcttttatgctgagatctaaaatttgattgctattcaaagataaaaattatcttataaacctaattaatgtaaatgaaatgaggcaaatattaaagaagtgtatttctaaaggtttctttttctttttacaaaaatgtcctctttgagactccttccctgaaattgctaatatttgtttaattttttatattgttgaaaaatgtaatgtttaggtaattcttcaaatacaaacaaaaattatccacatctctctatcacctgtgtttttgctattactaggaatttatcttaaaattttattaaaacctcaaattatgagcaatggtttagtttctttgggagactttaaatttgtgatataatctcttacttcattactaataacaattgtgaactatttgatcaatttttcccgagtagtatttaaggtagcacttttcaaacatatctttgaaatctcacatttcctactaaaagtcaatgagattttgcttcatattccattaaatatctatgctttttaatacaaaagtaattatttttaatctcatcaggatgtgttcaagaaatgtatgataagcatacacaaatatatttgtgtgtttgtatgcacacacacacattcacacacgttactgctggtgccaagcacgttctgggctgaaagtcttggccttagagtcctattataccagagctttaatggaagtagatgaggaacaaggccagcaattgacgaattctatttcaagttagttatttaactgtagtttgtatgatgctcatttctagttggtagaatgatgcagggaaaccactagggagtgaagccaaacaatttacactattaatatcaagtgtttgacatgatgagtgtttccaatataaataaatttggaccacttttttgttgttgtttacctcattcatcttcattagtgaagataactgaaatccgattaccttttcattttatctgaaacaaaatcgaatgttcctgcttttagttgcagggtataaaaacaatctcccttaccacattgtagtattgccccatatctaacgtctaatgggtctcaaatcaaatttgagatcaggaaaatcaataccaagcagctcatatcatttatttactaaatatttgggccagaaatagtaataaactgtaaggggataagtctgtttgggtttaatgggggggaaaaaaacaggaaacaaaacctcacctttaaattatcttaactatcttcacttataaatttgcaatgtatttaggtatatatttacatgaatatattacatatgtaaatgtaacaggaaatacaatgtcacataaataaaatgccttaacattgtgcaggtatgtgggacaaatatgcaattatgttatataatttaaaggaaaattaatttgcattgctgtgtaaaaatcacctacacatcaggtgagcaatcccacaaacttcctttaattcatatttaggcaatattttagtcatttagaaataataaggtatttgtaatgactttatcttttttctcttgttttccaatgtaaatcacaatttctgtggcacgtcttgtttcatcctgctcataacataatattaaatattaaattgtggagtaagaaccatcaaaatcatgggattgtagattttctaactgttcacctgggtcatgcataatctaatatacacaatgtatactttagacagttcctgctaaggaaactatttgaatgaaagagcaatgtagatgacagttagtgaaagttcctgaatattagactctttctgtatcattgcaactaagcgcttacaccatacctattattcttacatttgatcagacagggttaacctagagtgatatgtcaagtttcatttgatcagcagtctaaacaaaaacttaagaaaaatgataagattataatagtatctaccacaagatgtgaaccatcttacataacccctgaggttaaaagatcccaattaggcagagttcagtactttagtgatttactgtgttttattaaatggcatgcagataactccccaaagggaactgtggtctgcattaatgtcgagactcttcatgtcagaaataacttcagacatctttcaagtggtgtggtagaggagctctccgcttgctctcctccttaagaacaaccaaagaaatgaaaataaaaaaagacagtacaatttttatgttacattaatcagctacagcctaatctataatctcaacggaacatagagtaaaaagaaatccacagccagaaaaggattgaaagcaaatatacactttaatagattttgagaaacacaaagaaatagacaaactgacaattttagctggtaatttcaacatttctcttacagtaaaacatgaaaaaagtagataggaaatcagtagggtataaaaggtttgattaacactatcaaccaaattgacataatcgacttttatagaacactatatgtgataattacagaatacttgacatgtttaagtgcacacactgggccataaaacaagtatcaataaatataaaagaattgaattcataccaaattatattctatgaccataaaggaattaagtaagaaacaaacaaattttacacacacacacacacacacacacacacacacacacacacactctctccacattttttattggaataagaatatatctaataagtaatatagtattatacatctagtgattctgaatgtagattttgtcctgtaaatatattacacatgtgtctcaagacatacattgagaaaattcattgcaacactatttataattttaaaaacaaaatagaagactgaacacaacttaaattattattatgggactagtaaaataaactatggtacataaaataataaaatagtgacttcttcagaagccattaaaattaatgattcttctatatgtgcaggaaagcagtgctatccagtgataaaagaaaggtccatattgttacttagcatgttattattacaataggtaaaacattcccccaaaacaaaaatatctatatattatttaaatatttccagaattatgaataacaagatgaaacttaaattacagaattgattacttttaacatagcatatgaaaattaaagcacatcaggaacttccaaagtaaagaaaaaggtggcaaattgttatatatatggatatagatatagatgcagatatcttattttctgaagtgtatgtcagcagcaatgatcacatacaatggcatgagattctacgtgtgttacacgtgtcaaacataatcagagacaaaatagggaaagcaatatgttaaagtaaaaataattattgttttagagtagtagaataatgttgatatggtctttaacgtttatgttattatgttacatattgttttaagtgttagaagaggaactagaatatgaggagcaagggacataaaggactagacatttaaagctgaatttaaaaagcaactgtgacttggaccttaattctacttggtaaaaaagacttgctaataatattgaagttggctattaaaagaccgtggtaagtatcttatttgtttctgatgtgctctggaatggaagtagaatgcaaagatcattatattacaaattggtactcaactcttaattctttcaaaattttcctaatcactgtttctaacatcccagaactaaactgggatatgggggtgaataatgtcaagttggctgttcatttaagaaaaacaaagcttgtccactaacttttttgatttcccttatgttattcaaattcagtatcttccaaaagagctttttttggggaaaattttcaccatcttctaaccaattttatatctctaacataaaaacctgtccctgaaagcataatgacatttgtaaacatactaataattcagatctttacacttattcttggaattagaatcaaaactagatataaaccacttcaccctttaaaattatataatttacttgacattaataaattcttcttgaaaaggaaaaataaaaatactacacctggatatgatgaagaatgtactggaaaataacctttcacttcagagcaatcacaatgaaaagaactttgactaaaattgaataaatggttttacaaccctgatatagaagagcaattgctcacacatcaatcttcacgcaaattcagcaataaactctgacaaaaccttaaaacaaaccaacacataaaaagctacccaaggactcgagcctgaacaaaaccaggcagattttcgaagggagtgaaatttacaggaaaatagctcacaaaataggattcctccattttgttagttttgtttagagttttagcctaagggcaactgtagtggaggcagagtgtgggtatcaagtaagttgaatctctgataggaaatccgactgtcgtttaggcaagaccaagagaaagagcccttgagtagctgtaactgccagagaatgagaagaatccctgagagagtcagagcaggggtaactagtggtgtgcacgtactcaggcaagtgtttgactgaacttcaactataaatgacagaattttccgacgaagtctttaaagctgctattctaactgtatttcctgaccttcataaaaataaatgcaaaaggaataaaaagataggatatatcagcatacaaatacacctatcttaaatctattgatatatttatatatcttatatatcctacctttcatagacagatacacgaagaatattaaaaagaagaaaatggacacttgtagaatttcgaaacagtatttaaaataaaaaaaaattggatgggataaagagcagaatgaagatgagagagaacagagtctgtggcacacagatcaataaacaacatttaatctgaaaaaattaagaaatttacaaaagagagaaaaacaaaacaaaacaaacaaacaaaaaacagacccctagggacctgtaggaaaactgcaaatctctaacagatggtgcttggaatctcagaagaaaaggagagaatggagcaggaaaaatatctgaaaaaaatgatagaaattccaaaatgcaataaaaaacacaaatttacatattcaaggtgctcagtgaactccaaacacaatatattcaaggataatccctcaaaagtaaatgttagcgaaactgttgaaaactaaagataaagagaaactgtggaagtgaacagagacacaacacaacatataagtaggaccaacattagaatgcttacagacttctcattaagaaccatggggaatcaaagtgaaataaagacagtttctgactaaagaaaaataagggacccaaactacaaaatatgctcttcagtgagaaagaataatatgataggggaactcggatcttcaggaatgaaagaagaacattggaaatgttaagtatatgagtaaacataaaccactaaatttcctcttaatttctgtataaaacgtattactgttaaaagcaaaaatgacagtatgggggtatgtatgtctgtatgttgtgtgacaactataacgacaaaaacggtgagggagaaagaaaattatacatttgtaacatttctatgttttacatgagattattatcttccttaataataattttcacaaggcactttgaatttttagttactgataaaaatcagattgcctgataattttagaatttaagggtatgtggtaaatgaggtagtttattttcatcaaacaataatagcatcatggattcataaacaatgttcattttttttctaacatttggattacgaatacatttgaaaagttgaaacaagtcactataaaatgccttcaaaatgattgacttaaaatttttcaacttttttctagaacattatgagcttttaaaatttgaggttattttattcttattcccaaaacctaagatgtattcgcttggtagctaatctagttttaatcatgcagttaataaaatatttattaagtaatcctgttttgttggtagcctgtgttttgttggtagcctgtgttactcccaaaggtcataaccttcaataatatagttaataaaatgtggaaaatatttccacaaagaaacaacaggacttgagtttttaaagaataagaagtttgcttttagaatctgtaatgtgttagtcactctggagaattcagttggaaaaaaatgaaagaactgaactgctgagatatttaaaatctagaagcatgaggtgataagtcaagaaatactttgggcaaaactgaaattcgtatagcacaatagcatgcagataaagctaggtgagtacatgttttttctttttctgtggggtgaggggagtgaatagtggattcgctgtcttagaaccacagtttcttaatttcaggtttgaaagttatatacattaatttgcagaaaagaaatagagaccttacaaaagaaaaaagttacttgcaaagactattagggacaatttggtaagtactgttagagaaattaaagatgagaaaaatgagggatacacataaagaatgggattgtcttggttgacctggaatgctacagtggctacgtatttgcagagattataaattgagagtcattctggattcttgtacatcataaaatggagtttaagattactctagctgttgtgttcaggatggatttattcaagaggagggtgattgtctgagatggagtccattgaaatgacctttcaatggagatttgaagtgctaatcctatataggcgtgggaatgaaaaagatgcatagttggtaaataatatgaataagagtgatttttgtggattttgattgaaacaaggcaatgtgaggaggccgagaagataaaggtatcagaaataacttcttaaagatgagtttgttcttactgctagactttgctgacattgagttgacacatatcccaaagtgttatgcaatttgaaagctgtaaaaataattggttcttaaggttacatatagtgatccatatattagttcatttttacttaagaagatatactttaaaatgcatttttaagagttttcctagaatattggacctataaaatggtctgttttttttttttttttttttggaatcattgtctaatgcatttaggacagcagttctcaacctttttggcaccaggcactggttttgtagaagacaattttttccatggactggggcaggggagggatggttttgggagatttaagagcattacatttattgtgcacttgattactatgattataacattgtaatatgtaatgaaataattatacaactaaccataatgcagaatcagtaggagccctgagcttgttttcctgcaactagatagtcccatctggggtaatgggagacactgacacaattagatttcataaggagcatgccacctagatagctcacatgcatggttcacaataaggttcacactcctatgagaacctcatgccaccactgatctgacaggaggcggagctcaagcaggaatgtgagcgatgggagtggctgtaagcacagatgaagcccatggttcacctcctgctgtgaagcccagttcttaacaggccacagactggtccatggcctgggggttagggacccctaatttagaaaatacaatatagtatcctagttctcaacattcgcaatgaaattagaaatagctttgaagagtcctgaattatatatatatatatatatatatatatatatatatatatatatatatatatatatataaagaaactgtnnnnnnnnnnnnnnnnnnnnattttatttaacacaatgtttcatagttgttttaccccacactagggatcagcaacttttttctgtaaagaatcatatagtaaatatatttggctttgtaagacaagagacaaaaccaaagttacgtaggtgcttctacaataagatagaaatcaaaccgctacaaaattttattgtagttattcaaaataaaataataagtacaatgttatgtaatacaagcctacaaatgaaaaaaatgaaatatgtttttgcaggttgcatgtaaatattccctgtcatcaagtccattgcaaatgttggtctacaaaaaccatttttactttgcatgctatacaaaaagaggaacagactagattctgcctatgtatcctagtgtgttgaacaccactctagaccatgaaaacaaatttttttgacatgatgcctattagaatttttttttagaaaatcactcttctacaatgaggagccaaaaagtagtaaatctgattggaatgaacctcatatgagaatgatttttttatgaagaagtagaaacgttttgatgtaaaaaaaattaaaaaaataattaaaaaaaataggtagcaatgagcatcttgaggtgtgagttgataagcagcagtcatgagagagggcagctggaaattgagtcataaaggaagacctagacgtcagttatggcaaagaaggagaaggaacactcagaagagattgaattgagagtagaggtaagttggttggttatggagtgacagtttgagaatgtagagttaaaggttttggaatgctgaatggataaaaagccagggattattgaacattattatgggaatgataaattgatggaaggtcaatttttagtggcaacaggcttacaatctggggatgactgatgtgaacaggaatacatgacatgaaagatttatgtgatattgtctgtgtgaggaagggggtcactaagcctagtgtcagggagacttagttgctgtgatgatgggattcattgaagctccttgttctagaataaatgctattacaaagcatcatatttcttgaagcatgtgatgaaggattctggacaggagacttgcactgcaacctgagagactgtgcagataacttagaatctgggtgtacttcctcaattctcattatcctcctttttgtcttcctcctcctttttcccctctttggattacttttacattctcaggaatttcaagtctcttcagagagacttttatgaaagttagttcatgtcaaaccatcatctcttttaatctcttcttatcccatcatccatttataaagccagaatgtttatgcactggtgacacctgccccagaagtccactgctcattttctcctcagtcacattaaatcttttcaagagttatgatgccgagtcatcactgaagactgaatttggactttcctgtaaagtctagctgtctaaacatctgcttttctgcttctattcatttcaggttagtctattctaatattaaagtatcacacagaaccacacccaccttccaccaaaggctgatgtgaaaaacagtccattttcactgagcacatgttgtttgtttactgtattaatacctgtaggagactcatatgggaaaggtgtttggaggttcagtttgagatatccttttaccttaattgttatattacagtaatgttgagattgttgctatcctgttcacttactgcttttccactagagcagaatgcaaagaaaataatttccagatcaattaaaaataaaacaaaagatcttaggatcatgatttttaaatgtcttgactctttatccatcattgtatctccaaaattggaccagtattgtactagccagtttttaggtggaactattcagaataatcaaagtaaacagtgaataatttttaagaaagtgtctccctcttatctctgtgcgttttccctacatctctcttgttctccaataattcttttacatttgtatcttgaccccactctttctctagcatacatgtctttgccttaacatttgcctttctttcctttgggttctttctatacacagcattttcaacatgtgtcatcttgatctgccttttctcatactagtttctctacttggaatagccctttctctgcttagaaaaatctactggatgggcgccgtggctcaagcctataatcccaacaccttgggaggccaaggcaggtggatcacgaggtcaggagttcaagacgagcctggccaagatggtgaaaccctgtctctactaaaaatatacaaaaattagccaggcatggcgacaggcgcccgtagtcccagctacttgggatgctgaggctggagaaccatttgacctgggaggcagaggtaggagtgaggcaagatcgcgccaccgcactccagcctgggagacagagcaagactctgtctcaaaaaaaaaaaaaaaaaaaaaattatgaaaagccaggcgcagtggctcatgcctgtcatcccagcattttgggaggccgagggaggcggatcacctgaggtcaggagttcaagaccagcctgaccaacatggagaaactctgtctctactaaaaacacaaaattagctgggcgtggtggcacatgcctgtaatcccagctacttaggaggctgaggcaggagaatcacttgaacccaggaggtggcggttgcaatgagccgagatcgcgccaatgcactccagcctgggcaacaagagcaaaactccgtctcaaaaaaaaaaaaaaaaaaaaaaaagaaagaaaagaaaaagaaaaatctactggaacttgttggcccagctaaaataccatggctcatctgaagcctttttttgtccctcccatctctcaaccagattcagactgtttcatgacattccctcagattccaacaacactttctgcttcgctatattataaacataccataccatatttggtaatttgttagctcttccttatccttctcatgttaaattgagaattgttcagcaacaggggctgtgacttagtcgctattgtttcacagacacattaggactgcagtgaaactgtagaggaatgagtgaactgtataatcatcacgtctccgtgcatacccgcacaattgtacacatgcacacttttcttttttcttctatctttacattttctttattaatacattttaaaactatttctcccaaatagcaaatatatatttacatgtttctttaaatgatatgaaacttacaatatcatttggcattaacatttgacaaaaatgctatttttccaggaagtctacctagctgttctgaccaaggtatcttttctgttttgtgtatcaatgtcttctccaatgaacaagcaaataatacaaatacagacattgatccatatttatgcaatggcaagtgaatgcggttcactaaggcggaagctgccttttagaaggattaagagatctaatctaaaccatatactttgctggtaatttcagctgaagaatttggtttttcttctttgtggaacgtgtagtaacccagtattgttgttgtcactgaattggacaatatcaatgaaaacactagcagacagtttatgttttgttatattggaaaatgcagttagaactgaagggaggaccaacagggaataatttattgcaaacaacccaacatgaattactgagaattaggcattactctgttgaatactttttgacatgcttttcagccccaaattaaaagttattagggcatattgtgatgtagttatgtatacatcataggtagtatgtagttgtatcccattgtaacagacagattaactgaagtacgagggatagccaattctatagaatctcatagggagaaaaagactcagggaagtattctaactgccttttattgcggatcctaagttatgcttgaatttaagtgattctcatcctcagtcatcatgggttcaattacatttaagttcataagaatactaacaggagtaaattaattctggacatgggcattttggaaccaagttcgcttttctatgattattttactggtgtacattgtgtttgaagaatatagtaaaaaaaaagttggatgtttctgtattgcaaaaacaaacaaacaaacaaacactatttattcatttgtggccaaaggtgccttgaaattttatgaagtagtataaaaagtcaagctgtgggaaaaatgtgcatgggagataaccaagcctagtcccaccttctgcatttttcagtttgttttcttatcagcctgcccataaactggaaaagcattaggcacaaacccactgataagcatatgagaatttcttctagtgtccctcattcttctttatggaatctgttataagaattttggaatccccatttgaaatacaaagagttacaatacaaatgtaaaaacaaattattgtaacgtcagaggctgaaatgcatatgcaggatcccttttgttaatctttggatgaatgagagggagggacacctacctgggaagaaagagtagtaaattcagctcactaccaacagaaatgacagtgaaggactttcttaacattgaggctttgaaggttaaactgttgcatgtcactttccaattaggatgcctgggagtaagcaacagaaatagactcaggcttacttcaagagaaaatgaattcattaaaaatattactgggtgcagcacaccaacatggcacatgtatacatgtgtaacctgcacgttgtgcacatgtaccctaaaacttaaagtataataaaaaataaataaaaaataaataaataaataagaggacaggctttggagccaggctgcctgtatttgtgttaagtttcaccattacctaccagctgtgtaaacttgggcaagttacttaatgtctttgtcctcagtttcctcatctgtaaaggataattttaaccacttcttaggtttttgtgagtgcttagaagcaaccaacaaatgttagttctcaaaaaaaaaatatatatgtatgtatataagttctcagaatcaaagagaaagttggaatttcaggactggaaaatgaacaggagttaggagggcctacacgtttttgaacataggaatgtgttcaggaaaatctgatgaggttgctgcaactggaagccacgtgaatgggcatgcaccacatcacccttgctggatgctgagggtctgctgttgctcttgcgaataatttttcaattacagttttattatctcaaaattcagggtcctgggtgggggcatgacctaaggatattttatctggattttgtcttatggttaaagactgggttgtactttccactgatactcacataatacaaggatcctccaaaatagaaagggaagtcagatgtggagtagccaaataagaggaaaaaaatgtatactaggtagccggtatagagaaaatgggtgcgtggtcattaatttaccatctttaaatgcatatacttattttcagcgtaactggataaaaatgtctgattctttctaaattgtaattatatcttttatcttttctagcaaattacttactactagcttccagtaattaaaaaaaaaaaatcaaacatctatgtacaggtacactgaccaatatccatgaactgattttggttgatttaaacctgtagacaaccatgagaagtattaatatcacatctttacaaatgagaaaacagactcagagagatgaagtaacacgattgcccaaatattacaaagagcaattgacactgtcaggatgagatctcatgtctctgtgatagaaatttcatttttctacagaaccatgaaaaaagttatctttcagataacgtagctgtcatttcattcactattgactatctctacatttcttagatctctttttttctgtatttttttctttactaaaaatcgtgcttttatttttattttctattttgagttctattgcaatcagtcatattaggcagtaacattttctcctaaattaatgccctcatccattggttttatttttccttattctccatatctgtattaatttgtgtatggttttaatgaaaagtcacattataaaataagatcttgtatttttttaatctttataacctcaaggctcagcacagggcctagcacataggaggtgcctgatacatatttgctttatgataatgggctcgaagaaggaaaataaggcatgacaatggggtggcaaaggaaaagtgaaaaaggagaaagttgggtagagaagaaaatggatatgcaatgactagataaaaccatcttctagcacttcgacccgcataaatcaacacataagggatttttaaataacagttataatattgataactgtttgtctcctgtgggttccagtttatttctcggggcctgtaaatatttttcttaatgttttcaattaccaaaatgatttattcatcacgaggtcttctcttatgctaaataagttttatgaactgacatagccaagagaaagtctgttattatattccttatattccatttattggagttggtctttttgctaacttttatctggtatccatttatctcctaaaaagcgtggattaaaagataaggctttaggactggtaagtgacttacataattatgaatttaagacaaagggacatatttcatttctttgaaaatgcataaagtgctgcaaaggttttaagaaataagaactctttgaaagggcttcctgatatgaataattgcaaatgtcaaggtatgagagtttcctgatagtgattctatttctagaatgtcaggtactgatgcaaaggtgacatgagtgatttgaatgagttgttctatgtctcagagatggtcccatagagaaatgaaagcagtgctttataaccaacagagagatttatttaaggccaaaatgtcagaggtaatcaaactgtttaatttgtgctcatagttttgctttgcattatataactggacacacagaatttattgtatactgacaaattatggaaacagaattttataaaaagtaaagttgaatgctgcattgtggctttcagtaaattttgataaaagtctttatggtaatattcttaatgaagtataaatgctgatatatattctatataacatttttccttttgctttaagtttatattagcatgcatgcaacaaaatatacagaactgatcctcgtgaacacttccatgtgcatggtgccaagtgcagaaacaaaacatcgttcacactattgaaaaacctgtattctgacacctaccagtaactatttacccacaaagataatcattatcctgatttgtaacatcgttattggctatcacaaatagcattaccaagaacatttttgtatgcgtcttttgatacagaaatctatctatctacccatataagtttctgttaggtatataccttagagtggagttgctgagtcagacctatgctcagctttggtaagaactgtcaaaaggattgacaaattgattgtaccaatttattctcccaccagcagtgcacgagggttccaattgcttcacatccttggcaacacttattagtggctctctttttcattttagccattctaattataataccaaaatattttgtgtgtgtgtttgcttatatatactcctactaccaaaagaatgtaagtgacataaatcaaaataagcacttttcatttatcaatttatacatcaagattttaaagagtaattcctccaaatggtttctagactaaaatgcagcatattgcttagaggaggaaacttttcttcaatattcgatgatccatctaaaaatatgtcttaaatatttcaaaaatttatatttattaaacaaatataaaggttttgcaacagcttatgtagatgatggaattcaaggtgtcttattcttacaatatctctgataaaaaataactgtaaatgtacttatatgttttaatatggtctatatgataatacttttttatttattgaaataaaatatagcatgttggaggtttctatgtgaaatagaaacctaatagtgattctatttcactgaagaatttccatgtgtctcatttatttccaaaacaatattacatcaaattaaaagacaaatatttagtttattctaagatgtgttcttaaagacattgataaactggcatgactaaaaaattaaatgaaatcaaatttttacctcataaaacaaaaggtctaaggttccagataaattttgaagccagtgttttgtcaggggccatggtaaggctggaatttgggtggtgggccgggagccaaaaagagctgaggatatggttgctggaatgttcaagttctattaggcagggaagaaggtgagaacttcataggctttgaaagatatgcaaccagtgctaaaaagagccgcagtgattgactctggaaggtgaagcttaggattcaagtgggagatactaaaacattggcattggaattcacaaacattttaggcatgtacatttaagacatatgttaggaatcatgactccattttgccaattataattcctgttaggcagaatatctgaatcattcttctgccagcagtcccccatgtccatcacctattctgtaactatcaccaattattttccccaatattttcctaaagctgattaaacactcttgggtcataagaaatttacatttgtcaataactgaaaaaagttggttcaaactatgtgatctagccttcaagctgccctatggttttgtacaaatttaacctttagagcaaccatatcatcatatgtatattatcacaaaaattaatgttggtactttattcataaacatgtataatttacatacataaacttgtataagtcatgtacaacaataaatatagtgactaatcatcagggaaatgcaaatcaaaactacaatgagataccacttcacacctgtcaagacagctattataaaaaaaaaagtgttggtaaaaatgtggagaaattggaactctcatacactgttcagtatacaaaataatccaggtactatacgaagacagcatgaaagttcctcagtaaattaaaaataaaactaccttatgatctagccgtgccagttctgggtatttattcaaaataattgaaattggaatctcaaagagttattagcactcctatgttcattgcagccctattcacaatagccaggatgtagaaacagtctcaatgtccatcaacagataaatggttaatgtgccatatacatgcaatggaatactatgcaggttttaaaaagaaggaaattgtgcaatatgcaacaacacaaatgaaccttgaagacattatgctaagtgaaataagccaggcacagaaagacaaatactgcatgattccccttttatggggaatcaaaaatagtcaaatacatagattttaagagtgaaatggtgattgcaaggggctgagggagaagggaaaatgggaagttactaatcaaccgacacagaatttcagtcgagtgagattagtaagctctagagatcagctggacaacattatacctacagtcaatgataattcattgtacgcttacagatttaagagggtagatttcatgttgtgttcttatcacacaatttttttaactctttacaatattttcctagccttttctgcttgactacctgctttccacttctgtaccccactgtacctcctcccatattaaaaggcaaacacagatccttccatagtctcttcatgcttttgtgtatttgtaaaatagagtcatgtatcacttgatggggatatgttctgagaaacgtgtcgttacgcaattttgtcgttgtgcaaacatcatagggtatatctatacacacctattttgtatagcctactaggaataggctatatggtacagtttattggtcctaagctacaaacctctaaagcatgttactatattgaatattgtgggcaactgcaacacaacggtatgtatctttgtatcaaacatatagacacgtagaaaagacacagaaaaaatagaatattaaaatctcatggaccacccttatgtatgtggtctgttaccgaccaaaacattgtaatgcagtgcatggctatattgtacaagcaactatagtcatccatttttgtactgtttcagtaaaggtttccaaatgggaaaacagatattactctagtggtccagatagaagagatttaatacagataattgttacaaacagtgtcgtaaaggctggaggggccaaagtggtggtatgcagaacctgtaaacacatgttgccgttatcaaggcaggaccccgggcttacactcccgtcaccactgccactgaggtcctattgctgaggctggtgtgccagagccactgccagaggcttccggtttctgactggtagagctctcctttttttgcagaaagtaactagaagtcaactagcaaagaagctgagaagactattttgaaaggaagtcttagaaatgtaaatttcaggctttctaaccacccccagtaataaaaaaccatataggggcagcagcgggactgacgaccaacagacaacctccaatgtttatgtgtcggcgagattactgatagtataaatttatgttagtattgtcattgtctggtatacaaagatgggcttccgttgaattctttgttgtttttgcttttctttggttttctctcttgcttttgtcacttgacgatatctcagtgaaatttttccaagtcaactttattcttttccaagcacaaatttattctcttcaagtcatgaatgttattatatggtgtggatgaatagtaatccatccaggcattcgattatgatgagttttcatcttgactctgacaattacgaagagttttcactttgactcttctttttagttgaaataaacatcactgctcattgctctctgcaggttggtgtattttgttgttgttgttgttgttttttgttttttttttttttttacacggctaggtcccaggtttaggattgctggtgagatggaatatgttttgtttgcaattgccattttatattcccaaatgggaataacacattataatttcacaactaaattagaaaaggacagttttcactgcatccctgccaccaataggcattatctgggatactttcttaattacaattttatttcccagaaagcaagccatggtggaatgaatgcaaatactatcccaactccagtgtaactttacagatctttccaaaccattataatgcatggagatttttgaatcattcaccattttcaaatttaaaattgtcatgaaaattactcaaatcagtgaaggcagaatagcgtttcagtaatatttcagctaaaacaggtctaatgtttaattatgtatcttttattttgtgtttttattttcttttaagatggctaaaattttgtgagagtgctgctattgtaggtttgtatctgccattgtcgcaggttgaatcacttatggtaagctaatttatattgtaactgcattccaactcaagatcttcatagactttaatatcaaattttcatttcttgccacatgttcatcacaagttgtatgtcagtgtggagagaatctgcctaatggctcttcacccagaaatccaggctgctaggtgtccagcatctggtgaatttgctggtagttgtggcagaagagaaggtggcaaattaaaaattgactcttaaagacttctgcccagcagtgatgtatattgggtccaatcatttgttaatgagcaacattgactaacacattgattcgaatatcccttgaaacatttatgacatatttcctaacttgacataatgcagcacatagtatttcaattgttcttctatttttttttgtggtgactttacccattttgaattattttatgggtagagtaagaccattgattttgaaaaactggaagttgactggctctgcaaattgaagagttagctggtaaaatagctttccctttttatttgttgtgctgcttaggtgttgtgtttgttcttgcattgctatagagaaacacctgagactgggtaatttataaagaaaagaggtttaagtgattcaaggttctgcaggttgtgcaagcatggcatacacatctgctcggcttctgggaaggcctcactggtgtttactcatggcagaaggtaaagcaggagcaggcatatcacatggctagagaagcagtaagacagagtggggtggtgggatgccacacactttcgaacagccagatctcacacgaacccactcatattgtgaggacggcacccagctgtgagggatgcatgcccatgacctaaacacctcccaccaggcctcatctccaacactagggattacatctcaaaatgagatttggcagggacatagatctaaaccatatcaggcgactcactgaagaaaataatagtataaaatattatggcagtttaatcaataacattaggataaatagcattagtgtgtgtcatattttcattgtgattaaatctaaatgcagcccttgatcattgtcattggggtccagtttaatttcctcagagtgctcagacagtacctggggatacttgcagctctcaaattgttactaatggttagagttttcaattatttttgaaacaaatacaactcaaggataaactttgataattgaaaagggattaggatgttaaaaatgcacactttcatgaagacagctacttattttttatccactgaagaaaacatcttatggacattctctcatattacagctttcagtggcatggcattagaattctgattccatattgcttgttcttctacattgaagcagatgtcagtttcatatggattctgagtatccagtctgtcaaatataaatgtaattactggtcaatagttttggataatttttacatctgttgaagttgtggaggttttattaattattttgacttagattttattcccttcagaaagctgagaattcagaaccatattactttgggtgaggtcacctccactcctaataagagcaatatgtgctgagtagtcccggtgtgcatgatctgtgctgttatgactcacaagtcccactagaagtttcaggtacaggaaaggaatttcctccaaataaggaaaacgttgtgcacctgtgttgtatactgtttgtgaaaagcaagaggatgtagtattggaaaggtgtaaagcttatgctttagttggctagaacaaagttcatattttttctcagttatcaggggtcgtgaaagtcattaaatccaacttctatccagtgttagggaatctgagaggtaattctcaaacttttgcctaagtgtgatccacataattttagtaataagcttatttcctatttcattgtctcacctgagaactttctaactgaggtggaagcaataaatattatttgttaatagctctctcctcctccatgtcccttgccttcctactattaatactaccactattgctgctactgttctgctcctactcctaatacatatttaactaatataacatgtactctaccagacaaaacgttgggataatttacatatcagctaaagctgtagaggcttcattttgacttagagtttgttgcctccaacactcttaacattgtgaaccaggttatcttgtgtacagtccaccctgcttttagtaataccccaatgtgctatttattctgcattcatcatctcatttattcttcaccacagatctgtaaggtatgtgtgagccttattcacattttataaagtagaggaccgagatttagaaaggttaagaatgttatcaaggtcattaggattttaaatttaggctgcctggctataaagtccacgcttgtaaccaccctgcagtaccctcctttcattgtttttatttatttttaaattcttactctgatattgagattctcacctgtggtataaaaaagatcctgttgtagcggtggaattaataattaaatacacccacctgtaaatgcttgttaaatcaccagaattaaaatagaatatccatgaaatgttctagatgttcaaattgctcttgtcactgtgcacaccaagatttaaaacctagggcctcgtaagtattcagacaattgtcttggaagatcttgtgttttctctatttgctactgtgtgttaattctataccatgctaggatacaggggccctatgccatctttcaccttcttagtagaatgtttgatctaaatagcaatttggcttgccctggtgttgtgcttcccctaaccaaagaaacatggttctctggaagattatagtaccacattggtcagcagtttcaagtatttggcattgaagacattgtaaagcgaattataaataattttatcctgaattatctatatcataggcacattgtgacattgtttagtttgcaccgttgttcctgttgttggggctattgttgatattattttggcagactgtgctatgttcaaattaagactctctctggaactctcagttataaggttattattattgccgtactatttacaaaagagttgccaagactggtgcactggaagctgtgttccacttatcaattcaaaggaattttagtatcgtttctaccatcagggaatctgtgagctgagctagatagaatcagagagattatctagagattattttattgatcaccaaatgcatttttgtaaaagtaaagaccccaaattgaagctcttcaaacagtcagttggtgttactaaaatggcttatagttacagttatcagtctcttgagtaagcaaaatgttatctcaaagccaaaacaattttgtggtatggagagagattattaagtagttgaaatattgttgctgaaaatatggatttaaaagcatcaataccaagtgccatggaatttccaaatgacaacttgatattgatacaataaaacagaaaaagccattaataattgaaagcaataaaaacatatgccttgaataaaaacaacttgaagcccgtaaataatacaacatggctattcagtgatcattctgtaatattaaagtttcaaaaggcatcctaacgtgttggattttttgtttgtttcacatttcctgatccagatttatatttttgaaaataatatctactatcaacctgatataaagagcagttcattgcgactgacatcttctggaaaagaagaaataatttttaatgggattgctgactggttatatgaaggtgagttgatcagatttagtttcaaaggaaacaaatgacatatttttatacaaaatctaccaaaaaaaatctattcattccggagcaatacttacagtacagtttcttctcattttctctcaaaattgccctcatgctttcatatctttgcatgtgcttatattttgtgtggttgagatttacatctacttacatgattccatgtttggtgtatatatgtacatataggctagatagatattatttgtgaggacaactaatgaaagtaaatggttaccttatgtcactttggaattagatgctgaattttttctgactctctgggaaagaagaaacagaaacctttatttcttaaaaaaaaaaaaaatgcataaaaagccacctgattttagttatttccattagggacattctgtcacactttataagctattgcagagggagcaaaataaaacccacataaagagttattttcaatatctattgaatcaagttttagtaatagctgagaatataaaaataaatcaggtgatgaaaatttatccagtttttatcacgtaccaattatcagctgagttctacatatagattgcctgggcaagactcaaagtatgagtttattacctatgtttcagattcttcagctgattttggcaaaatatgtcaagatttaaagtaagtctactttattataaattataaagctatgaatcattcaaaaagtgaattttatttcatgggcaatatttgcaaatgtaatctctctacctcagatttgacatttttaattctataagaaaagtgaataatttagaccaattattcattcattcactctttcactcaaatgatatcattgaaggcctactgtattctggatagatgtctaggtgccaggataaaagacggagcaaaaagtactgctctaataaaccgtatatttacgtgaaatattttgttaggtggagctattttattaaagaagagatgttgtaacccttgagatttatatgtatatgtgtacatgtatatttatatctataatagatttctgtgtacatgccagcatgaaataagatttttagaggctacaatttattgtgaagagcagtgagagcttccccgaaaatattaacaataagtatgctgtgaaagtatatattagaaaaagaaatacacaggtaaggagtgttcattggttgagagttacagaatctaaatctggcttttctatttcaaagagatacattactggaggggactgggatggccctcagaatttaataaacaggtggacaacacatttaaaatctggttagttctggcagtctaggtagcaggagctaattgaagtgcagagactaagacgtgccctttttcttcaaaatattattggtactgtgtgacaccctgacagatgaagaaaccatgttaatgcagtgtggtaagtagttgaatcttaatcaacacagaattctatggaagaacaaaggaatgataccattctagggatttgcaagcattttttctaaaggagaaaccctggccaacaacagtagctcaagcctgtaatctcagagctgtgggaggccaaggtgggagaattatccaaagccaggagttccataccagcctagacaaaatagcaaggttttcatttctactaaaaaatttttaaaaattagccagatgtgatggcatgcacctgtgttcccagctgaagtgagagaattgttaatgagagagaattgcttgagctcgggagttgaagactgcaatgagctatgatccaggcccctgaactccagcttaggcaacagagtgagatccttacctcttaaaacaagggagagagagaaaaagagagagagagagagcatctgagtcaagcctgaacagttaacaagtgttacgcatgagaagaaattaggaaggaaaaatctaagcagatgtaacaatttgcaaaaacccacaagtgtgtccctagggaaccaaagtctccttgatataattgggccataaaatttgagacaaaggaaggtagcaagaagcgagggatagtgacctctatcaatgatttggaatttcaattattttcctaccatttaataggaaaactaatagaagttttcaagtaagggagtgacaagattggatcttccatatgaacagattgtttttgtgacagcaggaacctggggtctaagagtggaaagaaacggtgagcggctgtaaggcttcttctatgttctatcaagagataatgagcaatggaactagggttaaagcagtaaaaaggaggaaagattctaaaattgatgagacaatgaaatatataggtcttagtggctaagcagatggggtgaatgataagaagtcaaggatgattctgtgtcttctggtttgggtcactagtaagtagtggtggcagacatagtgagcaagcattaacaaggagcagtgggtttcagggaagagaagactagattagcagcaatgcgggcattgaaccacgtactgacgtgctcccttggtgataaaaggtggtctgtaacgtcgatgaagttttcagtcaactgagggtatactcaatgtagaccatgcttattgtgctgctccgtcccgaattaagatgacttgggtctctgtcctattgaaaaggcttcatacatttataaggaaattttaaggagagaaattagagaccgtttcctgacaaatacggtaattttcttaactaaagaataaaaatctatgtattcggtctgagagtaaactgtttgtaggggttgtggagagcagaacaaacgggtaatacaaacttttgtgatgatgctgtaggtctgacgcattccaaaggggaaaggaaaaagtatagtttttgccatactttgggctcctatgttgccgttaactaggaaatgctgtacgtgtatgtgatttaatcatcacaatgtttgtgcatctaatcatttatgaagaaactaagacgcacccagtgctgtggctcatgccagcaatcctagcactttgagggggcgaggtgggcagatcacttgagcccaggatttcaagaccagcctgggcaatatggcaaaatcctgtctctactaaaaatacaaaaaaaggctgggtgtggtggctcatacctgtaatcccagcattttgggaggccaaggccggtggatcatgaggtcaggagattgagaccatcctggccaacatggtgaaaccccgtctctactaaaaatacaaaaattagctgggcatgctggtgcgtacctgtaatcccagctactcgggaggctgaggcaggaaaatcgcttgaaccagggagttggaggttgcagagccaagatcatgccactgcactccagcctggtgacagagcaagactctgtctcaaaaaaaaaaaaaatttaactgggtggggtggtggggtagcacatacctgtgttcccccctactctggaagctgaggtgggaggatcacctaagccaggaagttgaggctgcagtgagccaagatcatgccactgcactccagcctgggcaacagaagcgagaccctgtctcaaaagaaaaaatttaaaaaagaaaccaagactcagagaggatcagtgatttagacatggcctcagagctaatgagtgggagagccaacatttgaatgtgtgtcttttgttcctaaagccagggcttagtcactagtctactctacttgttatagggggatgtccttcactgttccccaagacacaacacacgttttgggacctaaattgtcagacttcagtgatctgtttcctcagccaaagactcatcctactgtccatggacttactctaatcctcactgcatttccaggaggaaccctacccatgacttcaatgttaaggtttggcagagggatgtaagctattcagatgtttttgattttccctcactattttgactgctacccccaacctctgcttcaagagtcctacatgcaccttaccctcccactatcaccttgcttgtggaatgtgccaggagctcccaagctccagaccttttttttcccctttaatgcactcactgaaacacaatgatattgcctagggaatgcatgtaatttcaacgttatgtgtgtgatactctggtgtggagatttcctttttattactttacaggagtcaattacaatctaaattagcatgtatgggagacacagaaagtaacatgtaacatttcaacttttttaaaattgaaatttaccttttgtaaatgtcatagaaaaaaaagatgagagaaagagtgacataaaagacaataaaatatttttacagtaagctttacaggcatgtcttaatcttttaagaccaggccaatctgtaagagtggctgctgcccccaactagtcactaaatagagtccttaaaagtgtcagttttaagaatctttgtctctatttttagtattgtttagttcctaaagaaagtaaagcaatataaagtataatgcattttaaacagcgaagtcagaaaaataagaaaatgctcaaaaaggaagattatttaaaatgtaattcgcacaaaacacgtataatgttattcacttaaattgctgtatttaacctagcaatgtaattaaatacgatatcagatcaaagttttactttaaaaacttttaaaatgttactaaaaagaaagtttacagctacccacttcacagctttgaaaatttccataaagcatttaatctattaaataggaaaaaaaatgactcactttcaaatatttaagcatatagaataatggaactaatatgcttaagtgatttacagatatattttagaaccttgtatatttaagggattattccttaaagtttaatccaacagctgtggagcaaatatacctgccaggcattatctaagagcaatacgatgagaaatacgggtttccatgtcttgggtatttccaacttagtgtagtgataaacaataaacaactattgtattgggaaccatttggagcatagtaaatataaatataaataggatttatttcacatactaaatagaattataagtagaactaagtttgataggatggaggaatgtcaggtgcttcatagatgacatgggccttgtgttggtattcaagaatgacaagaatgaaaaggtgcggaaaaattcacgagataagcaatattcttatcagcagattctgattgttacactttttttgttgaaataaaacagggcaaaatgcctattttcaccttcatgtttgtttcacattaatgtttcacattaatgtcttttggcgacatgaaattgcattcatttcatcattgattcaacaaatatttattgagcacttgctcagtgtcatctatggggctgcagcatgggagtcacaggaaggcagggttatcagtagtgctgagtctccagaggtcaaacaagggaaggattccaaagcttttgttggatttgctcatagatcatcgatggccttgacaggagtaaaatcagttaattggtggggccaaatccaagactgcagtggatggacatgtaaatggggagtgagaaagttatgaatagagactattctttcaaggaatttgacagtgaaatgcagaaaattgaaaaaaaaaaaaaaatcaaccacaggcctgcagagctgcaagtagcatcctcaggaaatcctactggtctgaactgacaaactaaaaatggaaaaaatcagcttgctttttacaataacacattaatctaaacacaatcgttgtatctcagtattgtggaagtgctttgtgttgtggctatgtttttaagtgcctgtgatataaaaccacatgtgctgaaaactccatctgctctgcagtgagattttctaaatcagagtaataaaaacgatgaagagccaaacctacactaaattggaatgaaatgccatttgtaaaaataaattctttgtaaataatataatataattaacattggaagtttcaatccatgagtaaatgtgcccattagttgcagttaaagaagcttgtgccttatccaggatgactgttaagcaaatgcatattaaagattattttatttaccaccttcccattccaggtagctttatctttccatctgaagaaagtcacaaggctctctatatgattattttggtacattagcatttttatggggaagaacattaatcatatgtcactctaaaataaatgagagtaggcgatgcctcatttctcttgaaaagcgtactcaaatttgggtcaggtttattcttgggaagtactggacacacatatttcagcacctacgacagaacctgtttcttagaaatctagagtattgattttagccaacggggtatctttgtatcttcaaatctcatagaacttagagtttacggtggggccgggcatggtagctgacgcctgtaattccagcactgggaggccgaggtgggcggatcaactgaagtctggagttcgagaccagcctcgccaacgtggtaaaaccccgtctctaataaaaatacaaaaattagctgggcctggtggtgagcacctgtagtcccagctacttgagaggctgaggcaggaaaatcacttgaaccctggaggcagaggttgcagtgagccgatatcatgccactgcactccagcctgggcaacacagtgagactctgtcttaaaaaaaaaaaaaaaaaaaaaaaaaagaacttagagtttacactcaattggcccttagcatgcatatatatacacacacacgtatatgtatatttttttctcaatgtgtcatgtgtataactcatgtctccttaaccaaattgtaagttagttgcataaatcagtgtcaatatcacaactgaagaaaggtggcacgttcaaaagggagtaattcaaggagtttaagctatgaaggggccccttatcatgaacaaggtaaatgccacaaccgtggcttgtaatgatttagccattaacagccaaagggggaaggggacacagcagtcacctgaaactaggagagaatgctatacaatttttacagaaatagaagcagtggcttttggttgggcgaagccaaactcacataatttggatgcatgggagataagaaaataaattccacgcacccacttcctcccttcatttgattcgccagggtttcatagtggtcatacccaagaaaaagtcaaagaacataagaatattcttattattcaaattaaaagctagtgtcccaggaaaagaagtacataaaatctcatctgctattgtttcattgcaggatggtattagtcctgttatatatctgaaatctgtaaacatagccaccacttgtatttttcatagaaggttgtggagaaatgcccccattaataataataataaaaacttattatgtgatcttagttagtaattacagttgccttcttccaatgttcatttcttttacttttactttctgtcaggatgctacagaggttatttaacaggtggatcaggccaaaatttcattcctgccaaatgttactcctttccatccttttctatttttttttttctttgacagagtcttgctctgttgcccaagctggagtgcagtggcacgatcccggctcactgcaaactccagctcccaggttcaagagattctcctgccccagccacctgagtaactggcattacaggtgcccaccacgcccagctaatttttttttttttttttttttttttttagtagagatgcggtttcgctatgttggccaggctggtctctaactcctgacttcaggtgatccgcccacctcggcctcccaaagtgttgtgattacaggtgtgagccactgcacttggccccatccttttgttaattatgttgttacaatttcagttttccatcgaccagtactattgggcaaaaatgtatttgtgactctcctgagttccaaatgtatttctccttgccctcctttgcacagcaaacatatttttatttctggcagatgaggaccatcatcagacccagcttagtaactgtgttttgtctttttttgggggagttgcataatgagcccacaatggtggggagaaaatttccgtttccaattcagaggaatagaattatgactatattcctggtggataccctcgtcctttaggcaatggacttctaaactcaccaacttcaatattatgggaataagaagcaaattgtgttctgtgggttattgctgtgataataaaagataacactactacttctaccccttagtgcctagatctgtacctcatggctatacaggtggggcacactgcatgttaaaggatgacatcccggcttcaaggttattgctaaacaaatagtgccaaaactgaggtagagcagactattttactcctctatcaatccaagtacatatagctagtggggaacatgataaaattagtaaataccaccactgagcccatggtgcttttttgccacaaaatatttccttttttgagataaggtaatgtggattattatggtaatggataaatgtttctgtaaagagtagtgctgaacagatccattggcagcaaaagcaaatccatgcccagaatatgtgtgtatctctgtgatgacaaaatgctacactgtcttgatggaaaggttttcatataattcatgtgccttcctcattacattatctcaaaaaaggaaatattttgtggcaaaaaattcacgtgccatcagctcttcccctgagaagtgatcctatgtcaaaggctcagcgatggccactaccattggcaggtaatggtgggagccagaggctgacggacatgtacttggcagtcatcttgtcctaaatttttcccctttctagtaagtcgattcacttgtttttcctaaacctccctgtcactagttttctaattttacttttgccacatccctgataggtggacccttattagttactgcacttgagtcaggatgtttccatgcctgaaactaagtctcctaccacgaacagtggacaacgaagtattctgttcaaaatcttaccaactgggaagatttctgtttcttattgtctttcagtgccactcctgagtcagattctagtatggagcctacccaattccagctcgttgttgtacatcctgcagacctgccataaaccaggcccgcgtttatttctcccttgccaacttgtgttagaaaacatgctttgtggcacagatgtgagatgaggagaggggatgaagcagagaaggcaatacaatgggcaatcacatttgttttctggctcaatttcacttttattttatagtggaatggtgtgtgtgtgttcagttctatggtcagtggatcagatagccatcagttcatgatgggcagtttgggttgcatactcacttggtatcccatggtgaggctaaatgtttctcctggagccctggaaagagctgcccttgaaatagataatatttttcagtacaagcgacaatgatcttttttcaaatcttgtaatgcctgtcctatgattgtcatatggagagtcccaaaggctccacacagcatctctatttgccatgggcactgacattgccattggatctgctggagtcacaaggttcaggacatagaggaggttgcaacatggcctagatcagttgcaaggccccctggtacactgattctactcagaactagcagttttacagcttgcctgggatatagaacagagaacatatgtcaatgcggcttgtgttgttttcaaagtccaaagaattcaattcctctttacttttacataagtacaattgtaacaaattttctctgactttagaagagatatcccggtgtatcccaaactactagatttctagaaacatccccggtgttgcacacttttaaattttaaagaaatttgtctccctttctctacctctatgcagaggagttctagttccctaggatagcggttgcctctgtcagcaagaagatttgtcagaattttgatgttcaatatcttcagccataaaattaaccacatacagcagcattcaaccataatgtgttatttataagattggccaagaaatcataactatactgtatgcttttgtccaaacattcttatcctgtgtgttggggtcccaatccatcgttatgaatatctttgtcttaccctaaaagagcaaatggagttgagcctctaatatgtattgcagccgtgtacccgttcctatgttctcttggactgtggccatagtttccctgcaactacagaagagatggactcttccaaagataccatcgtgacctttggttttgcatgggcattcctgatttcacaatcatggtttcaagctttcttttttcctgtgtactatctgtggggtgtcagaagaaccatgcgaacttgtttcctaatctttacatcatcattgttgtagcaagtaagtgctacaacacttacttgctataactagagatgctgtgtggagcctttgccactctccatatgacaatcataggacaggcattacaagatttgaaaaaagaccattgtcacttgtattgaaaaatattacctatttcaacaagcatttgttctcccaatgccttttccctctacctgtattttattccatgtcaccaccactgatgattgattactcacagttccgtctcttgctatggattgtctatgctccaattcccacttgagaaggtgataaattccatttgtatatatagatagagagatgacaaatgtagtctcaacatctaattttgagggtctcttctgagtctgctgctattattaacttctgtatctgtcagagtcccaagtgttggcacattcaacaagatgctttgaagataattgatttacaaagtgaacattttattgtctttttatttacaaggagaacatttgctgaggttaaggggtaggaaaaccacaaaggaaagtgatgtaaactaagctagtagcagccaagttgttagcactcctatgaccatgaagatgagccattactagacacataaggagaaatttgtgtagaggtggctgcagtgacagaagtagtgacatcatttaaagttcacagccagcctgaggtaacattgtaggatagagccaagagaataaataacctgactttactctcctctttctaatctcctgccaaagggaagccagaggacatgggggccattttgatgtcgttcatataggttagctttctggaccagaaagcgggaatcaaaaaagtggatagtggatcttgaattaaatgaaagatacccagtatacttcttattccattttcttagagcttaaaatagtttgatgaatctagtgggccctcagtttggttgatgatggtagaatgcaaatatgattacatgcaaatgtgaatgaatcatgacatggatatggttttaggccacatctcactcttcaatcaccgttctcattctgattactccagtagtgctttcatctgttctgtctacattgctgaaaatccatgaaatcctgacttaggtgcttcattgtttccttcctctacagctgcttgctcttcctggaattaaaagggtgactcagaattagagaattttcagggaagttaataaaattcaatacacagtctagaaaatataggtgtacaatggagatttcaaggacagatgtttgtgggtcactgagcccacatctctacagttggtctcaaataacactcatttattctagaggaactcctgcattctcacatcgcccactggtggtcaccagatggagaaagacttgccttcctgatgataaatgactctttggtacccaccatggttatccctcggtttactggagcgttgtatcccaaaggaaagcagtatccgtatcctaaggtaagtaacgtggaagtactattttgttccttctctctctctgcactagtgacttgacggatggtattcttggttcttgaacaagttgtctttggaggaaaacagaagttttccttacttgtcagactcatcactttcgatctcccagtagtctatacacagtgcttgggtagagagaggtagagatgatttgaaagtgtgtgaactttcacttttgttgcatttctttccttttgatgctcacttttattttttcacaccttacagttgaaaggggagagagaagcaattgggggtgtactgaggccagggcaatgttttgtccaaggcctattccataataggtgttacaaaggaggggaaagtgccatggtcaaatacattggaagttcttaaaaaaaaatctagcttctttcagatgatttcttagagcacttaatgtgctatatgttaatgtatattataaatcttctataaaaaatagactatgcataaagaatctccagtctgaaatagattaagcataaagaatctcaataaagaaaggaccaagtataaaaaaatcacccataaagaatagactaagcagaaagcatttattagtattagtatcaatatcagcattaccttggcagagcatactctagaacacactatataaaatgctggtatggagtcatagccatggttaggtaagacagatggaatttttcatcaggtgaagaaatatggcaatatgttccagacagcaaaactattttcaagtgttgggcaaggcctctataagagggttgcaaaaacatctggattgtactgttttttcctctgtatgccatctttaattgctcgagatctcttttaaacatgtattttttcccaatgtttatataacaaagaagaaggctcatgtgtaaggcccccagtatattaatcatgtaaagaagtcttatgggaaacgtgtaaaatttctcttctcattttagctcctaattaagtaagagaggatgttgatctcatttagaagccatttttaagccatttctttagtgagttgtactttgtctttttcaagcacaataggttttctgccgtttaattcatgcactacattagttagacaaactactgggtaggttcccatcaccctcattactctagccctgtcagggtgggggtgaggtcatttacactttccttctgttcccaccagccaccatattcattttatccaaaggcaaaaaaaggaggcttgaatattgaggatcagaaataaaatgagcatattcctcagtgagatttctcatccatgttccttccacaggttgtagtattaaatgcaagattataaagagtatgattccatgattttaaaatgtgatttatagggtcttctctggacatagattagaaagcagatatactcagtgctttttaggagaacataatgatttaacttcacaaaaaaaaaatactaagagatttttattgtactcaaagaaaagaacttctgctttctccaattatagatttagctttttttttttttggcatgacagtttggacctatacagcataccagcactattttttcccccagagaaaacctgaaaagttgccccaaatatattaattctcacattgtttgatttatgataataaatgttcacctgacaatttaaatgtgaaatggagaactagtgacatactgtgaaaggcacattcaactgttcagtgcactgcacaaagggaatacaatcacatctgactgctcaacgcactgcacaaagaaaattcagtcagttctgtggaagggacaactgtttgtaactgatttcccaaaagaaatgggatttttttttattcacatagtaaaaccaaatgcattgctgcatgctcaaattgccttcttagttctagactcatggtgcttgaacttggccatgcctaggcctcataattttgactagattgagacaaacaaacaaaccaatgggagcatttgaggaaattaaattatgtcagcaataattcagaagatactggatatgaacctagatactttatcatttgataatgtcttctaataaattaatattgcttaatagtaaagataggcgtaacataataatctttgtttattaattgtagaaatcacaggtactaatgataaactttatgttttcagggagactttccacttgtttgtttttttcttatttggtctttatcacaattgtctcaattttacaaatgagcaaatagattctgaaaggcttagtgcttttatacaagtcacagttattttaagaacagggaaaaaactcaaatctattgatttcatccctctctataaaactcccacaggtcaacaatttgtatttccaaaaacacagctggaatccaaacatctccttgtcaagttaacacatacatatggagctctgtttgctccatttactcctaatgacttagctacatgtgggtgccattcttagcctcaaacctgtcattttatatatatgcaaataatatgtataactatatatgataactaccattaatatttattagaagtaaaaaacatatgcctctaataggcaaagccaaaagaaagaatttccagtcctcaggtgatttttagtaggaagacctgctcacctacccaggtacttaagacaataggactctaagaaaataatctgttttggtccttgttcttaaaacaaatttcagtatcattttgggtatgttacgtcaattttcagattttttattatctactctggtttcaaaaaatgttttgttagtttttgctgtaacaaatgtattgtttcaattcactcttatgtgataaactttcaaaaagtgccactttggaaactgaaacaacacatagagtttatactaaattgtgctttaaattaaactagatgaaaatgagtatagcaaatacctaatgtggtcagatttactaatgaaatacagtaaacaaatatatttgtattttacttaattcagcatgattcagaactcataaaataccctatcattagcaattcagcacaaaagagatgcacggttctatcccagtaacctcaggttaatctttgtaattaaaacattatcttgtttaatgacaatctagttgccagtaaaataaggttaattgttattgaggcttgtgtttcagaataatagaggggagaaatttgtggatttgcagtcttcatggcaaatgtaactgtaaaaagcaaatagatgaaaaccctccaatctgcaaactcttgaaattattcaaatattaaaatttacaaatgaacttgcgatgtgtgcttaatttcaaaactccatggaaagatacaaatctgcgattagagaatgctggactgttgaattttggaggcagcctaacgcttagttgagatgttcacgttttgtctgaaaactggccacattgtgtgcacaatttttactttgtgataagcttatagcgctgctgacataaagaaaactgccttaaagatgataactgatacgtctttaagaaagtatgccataaaactgtgcatcattggtaagaattcacagaaagatctaatttaatttaatttcccgcttgctttaatcagtgtatctaatgataaaaaatagaagcacagcttttcactaactggaagatttaatgtcttaacaataattatcattttaattcactaccatatactattttaggcactttacataaatctttttattagtttatgagatattcttatctacagacaggaaaccttcaactcaaaatttctgatttgtgacatattctcaaagaagtgtttgtctcatttttgacaaaataagacaaataaaatgatacttgagaatctttagcatgtgctcataaccatgccaagtaaataacagactgaacatttggactcaggtttcatggacttacacattaagctaagcctgttctcgaaatgtggtcctttcaccagcatcatagggcatcagcttcatgctggaggtggactgccttcagcagtcagtagcttaagaagcccctcaggacctctgaatgattgcgatgctgtctaacttttgaccaccactgagctgttacatagatagatgcataaatagataaagatacagataaaggtcaatgttttattaaaatttgcacactcactatctgggaattttgtaaaaacagatttgtaggcccacactgagagattctaattccaagtctgaatataggtttcaggtggggtccatgaatgcgttgctcaggttccaggagatgctgattgatgctacggtccaagaacaacactttgaatggcactgccaatactgtgtcaggctgtaaagttcaacatacgagacccagctagagaaatggtaggctggtaggctaaaaattgaatagattaaggccgttattttgagggagaaacatgacaactaaattaaaacaagaatgatgtgaaagagagctcataagagtcacagaaggctaaactgcccaaaaaatgttcccgggcactgttgggcttgggagtaatgaaaagatttgcaaattctgatccagaacctttggcgtgcgggaggctcatagcttatcttccaggaagccctttactctatgaaccaatttcataatctctcttaacagttacctcatttccatagtggaaacctttcctgacttctttctttggctcaaaacttctaacctgtgaatgatgtacttccacagatgtgctagtctcttttgatatccaacaaaacatttattgaggaactcctgctggctactgttggcatatattatgttgattctggtcctgatttaactatgggttttgtcaatgccaattccttaaacatggatcttcgtcatttttaaatcagttttattccctttaggttgtttattggattttttaattcaactcacatttaatttcctttttcttttctatatatctcatgtggacttctttaagcatcagccacatcataaggataatggcatattgtttagaaacatattaagtaccttattggtacttaatggcatattaagtctaaacttaatggcatattaagtttagaaacatttggtacctcattgatggggttattcatttattcattccaattgcttgaaatatgtcatgaaagttctcattcctgccccttactcacagtgtatttggcaaaactttgaaggccattgtgttggaacaaacagaaagcgcaatattcgcattgtagttaagaacatcctgggtttaaatactaactttctcagttttaggtatttcacgttgcactgtttgcttagattctccattgtgaccaagagaatgtttatatcttacgactgtagtagggacatttaatttaataatttgtgcaatgcctttagtgcctactatgtgccagaaacgtaccaactactatgcctgctagttattatttatttaatgaagtgttgattcactgaactcaaattaaattatccttgctatccttgcctttctgttcttcatgccaggtactcagtgaggacagtctgcccatggcccacctcccaagggttgtcaattatgcaaatgagtcaccccatttagtaattagtaatgtttaaaaggaaagcccgggagattaatgcgatagcatacattacggttttggaattttaagcacagggcacctggttttggtaggcgtctttctttctttcctttctatttttcttcatttctcctctttttttttaattagccaaaccttcttcccattgcatttcatatcctctaatgtgaataactacttgatctactagtttgtttgtttgtttgtttgtttgtttgtacagccagcccttctggtgccattttagggaaagaacacagaagcactgcctaatgagtgaagtcatcacgatttcctatcacctttaattgtctgaagaaaatgattgagaagcagcaatcttcaaaaacaattgagggcaatcatgttgtcgaatttaaaatcatttctacttcagagaaattaaactttttttcttttctaacacaaaacagtaaatgaatcaaaaatccttttcttttttacccaatatattctaatgcttaatgtacttgcaatacaactttcattttctcaaaggcaggtcaagtgaacccaacaataaaattatatgttgtaaacctgtatggaccaactcacactttggagctcatgccacctgacagctttaaatcaaggtatgcaatttcaatttcacttttatggggaaatagatattttcactccaattatcattttgttgcaatttagagagagatgtgatcagctcaacaaatccacttgaaaataaagctgaagttgcctacattagtgaggaatgaagtcattctcggtctctggctgttcctaggaagcatttagctccaaggtgattatcagcaccatacaatgactgaagaggctgatactgagaattaggtcttttgctggagatgtgacagagatgggaacaaaagatcattttccactgaattttcttcaagaaaatagttgctccacattttttttgaaggtgttcattaaaagtgtataatctctctggaatttgtgagtttttccaactttctccccatagttttgccaaagattctctagctttcttctccagacatttaagaatttttttttcaaaatatcctatgtatgaaatgcttatatttaagaaacttgatcagggagaaagtaaacacattttattgggtcagaagcataattgtaatattagcaaaatcttcagtagtgaacaactaattaaataatcatgtgtattttgaaatccatcatggtttcagacttcaaaagtgattctttcaaatactagagtcctttggaaatttatcacaaccctagagatgggataggcagctgatttagaaaaatgttttcacattatattgaatgatgtggggataagttcaaagtttattttgatgatatcgataatcagggtgattggttcccacagaaatttcattcaaatgttgtttcattgacattatttagaaaaaatttcatcccagttggtcattttcacagagagtgcagcctgatgtgtgtggaaattttacgtacttgaaaaggtaataaaggtttatggaatgcttactccagaagaccctcattaactacctaatataaacttctccttctactgatggaaaagataaatcccagtgagagtaaatgatttagattaggggctcaggactcattgataagaaaagtagaaaatgaagtaaggactctttcatcaggttacagagcatttcatccacgttggatggaagaccttaataataggcctgaattggcatataatgtaatacagttgaccaaatcaaatagtaacatttatttctgagcttgatctagcagccatgaatggttacgttacaaatgaaacaatgatggatactattgacattttatctggtccttaactcttatctttttctctggtttgtttaatgctatggaataacagaaaagggaaatagactaggagtgcttgagtcacatgtctaccaccatttcatttgtctcattggataaatcactttacctctctcagggctgaatccccttgtcttttttttttttttcttgagatggagtctcactctgtcacccaggctggagttcaatggcacaatctcggctcactacaagctccgcctcccaggttcacgccattctcttgcctcagcctactgaatagctgggagtacaggcacctgccaccacgcccagctaattttttgaatttttagtagagatggggtttcactgtgttagccaggatggtctcaatctcttgacctcgtgatccgcccgccttggcctcccaaaatgccgggattacaggcatgagccactgtggctggccccgcttgtcttgaaataaaatttctaatttttttcctttcaaaaaaagtttgcaatgggaatcaaatttacaatatccatgtttctttctaaaaggagctcttgattcctgaccttgattttttttacctatttgtataaatataaacatatataaattgaattattaataacatactttcttcatgtcctattaagttaatcaaatgtcctctcttctctttgatgtttgtgttgtgttcatagtatagctacctgtacagtttaaaatactgcctaaactctcaatagcagaatatttaaataattcattttataataatttacatgtttatgggttttttttttttagtatgttacttaagcatctggtatatttttataatctttaggttatctgtgaattgacagccaataagtgaatcatattatgtttctcagtacagttataaactatcatttttttcttttttagtacttttttccaccacacctaaaccacaaatatgatcatctcttagttttcttgtcttaataaaatcgccaaaatgactacaataataattgaatacatatatgattatgtctatataaggaggaataatagtaagataaatatagaaagatttttttcatgacttccactaccttataaaccagattctctgacctccacactggagaacaacatttttttgttgtttgaattgaagatcttaggtcctttttttggtctgtctgattgcttatttggatgattggtttccttatttataataactagtgtttatcactgtaatagaaaaagttccccaagctagtatcattatcccttcaacccaatacttatactcaccaaagactgtaaaatacattttaattaatttatatgatttagaaagaaattaaaaggataagataatctacagaaagacataatttcttctcctaattcttaccctcatagtctcttcaattgttttatttatttatgtctgattcagctgaagtcatttcatcaatttagacaatgagtgcaacttttcctcaataataattcagttcagactcatctcatcaccattcagtttatctttacctgaatcacagtctgtattgattctgaaaagaatgtagcatggtaggaactaagataatgcccctttttgaatatccccagaactagtgggagttggatgggttatctcatcttggaaggaagaaacattttgtcaaattgttgtactgtgcacttaaggtattgcaatcacacaatacctttattagaaaatttaagtgtgaattttaaaatatatatttactttccagggaaattttatcttatgataatgaatcatgaagattttccacagattggataagtcacattaatttggagaagtgatacgtggtcatttgtgtagacctctctagtctgaagagtaaaagtaatgatttgtccttggtttcttcttactctatgtccttagcattattttacttcttagaaatctttctgtagtcacttatcttttgtgacccattgttctcaacctgcatcactgatttaacatggtcattttgcccctgtgactctgggcttgacactgtcatgctttctctccctatttctttaagtatatctagcctacatctcttactcttccaaggagtatctgtgccttccaagaaaatctaattaataaattaacccatgttcatggaagtgtcctgaataacccttctgacaagtaatgcatagttattaacagaggtctttgtagaacgctagctataatttggtcatgaataccatcacaatatacttatgggaagacatcacagattatctagaagaaaatgagctcaaagtaactacactgcacaaatattttggtgtaaacacagagcaatgattggacaggaaggccatgaaaacacggtgtaactgctaacatacctgtctgcaggtgatgctggggcctccattccacataaccttgtgtacaattagatcttctgtgccagaccacccagctgatagaaagtctgttgacttgagtgcaatccctctaactagcttgtctctgtctctgtggctcaagaggaccagatcctcgaggacttcctgggtaatccagagccatggagactaggaacaagcaggaaacccagttataagaaagggacacttctgctggccactggtcgtggaacaccagatctaatgtgttcatgagatggagttccaggaggacagctacatctgcagcaggcaggccaacgagtgtgacatttccaggtaagggtgcttccctactccctcattcagagacagcctgaatacttatgagtaagcaagatcagtcaatatgaatcacagggagatgtacacctaggctcctggggcaaggaaagaaaggatataggaagtgattgagttaatagatatatctttcctccctgcctatgtgtcaagctctacttgagcttccattttggctatctccaacaccttcatatagaaatttcagtggtttgaaatggtcgtttgttagactttaccaattaaaatttgtggagagctttcattcttcagattgtgtttaccatgtgcaaggtcattcttgggtataagcaaggtttgtaatgaggtatctcacatcagattatgctttgcttatgaccgtaagccacattatgtaaaaacagacacaataatcacaatatttaatcaaagagaactataagtatattgctgtaaattaatgattttcaagttaacagtttacaactaagttagtgttcccttaaaaatcagttattcaccacatttgtactcgttggcttttcattcttttccaaagattaagttcttttttttaagtcaaaatttggcatcttagctaataaatatattctgtcatgcctgtgaggtgttgcaaagatgttcttgtagcatttcatttgagaccaactttgaaaaggaaagctctcaagatgaatgtttaaattctgttttgttgttggtggtatttatttttaaaattattcatgttagtttgttacctcatattgcacaaaatataatattatggcaggtaattgagacaaatttctgattatattagaaaagcaactatatatcagttcaatatagagtttaccaaaaaatatgaccttcttgattttgcagtctttggttagttgtttacaatattcaaattaattttttacttcaaatttcaacaacatttatatcaattattcagcatttcagcacttattttctgattatttatagtacttactatcatttttctataaactaaattctctagaaaaatctattaaaggttaatacttcattttctactttttaatattcacattgctaaatataatggtgtatgcaaaataatcggcttaaacgaaacacagtgaaagtgaacaggacactgttctttgcaggatcacaaggcctattgatatggacaaagattatacctaagccagctgcatatttgattcaatgttgccttattaactctacttcgggcactttatgttttgatttcactgagtttaaaggcagttttcaagcagagctcagctagttgtggcagctgccagatgtcttgaagaaattgttgaaaaaaatattacagccttccttgtatgtcaagttatgcttgcccttctactgacatcttcactttgataggctaacaggttttctagaggaaacagtagctactcggtaatgttagatatgtaacattcatgtagttgtatatctaacccagatacctctaaagacaggcaatttgtatcaagaggttatttttctgtagttgatatttttctaagtcatataaaactgggttaattaactgtgttttttttttgttgtttttttttttttgagacagagtcttgctctgtcgcccaggctgtagggcagtggcacgatctcggctcactgcaacctctgcctcccaggttcaagtgattctccagcttcagcctcccgagtagctgggattataggcatgtgccacaacacccggctaattttttgtatttttaatagagacagggttttaccatgttagccaggatggtctccatctgctgacgtcgtgatccacacgccttggcctcccaaagtgctgggattacaggcataagtcactgcacctggccaaaactagtttaattagttttaatacagtacattgatgacactttccgtgacacgtggatggctgtttcttctgagatcagatgagattgggcatgttcaggatggtatggctgtagactggatggctatttctaaagtaactgatctgttctgaaactgggcaagtttttagagaagtttttttaagtttttatcataaatggatgagtattgatgattgcattttgttgcgtgtgagttggaagctttgtgacatattgtatacctgtccaaatgtatgtgttacaaaggaagatatataaactttccaatcaccagttaccatgaggacataattggccccataaattatatctttattataccaagaatttaatagactcccatcttctttaatttgattcatttcttgtttaaaaatgtttcaaataaataagataattaacaatatggaaaaaattatgtattaaaaattgggactggtccttggtctacaactggcaaagaccaaaacaaaccattcataccttggtagccaaagtccccacgtatgaagtgaaataacacagaggttatgtataaaggatataattattaagccaggaataatctttgccttttaactggaagagattattcttgatgattcattgattgtgattttaaagaaaaaaataacatacctttataaatgtatacttgttttgcacttaaaggagtactaatcaatagaaaattttcataaatatctagcatgtcattattttgatttttccaagaaatacttttctgggaaataattcactctcaaatttgttctcaaattatctgtatatttgtatacatatgtatacatccatgtgaatacatacatacacatatatttgtatttatatatgtaaatattgaaaagagcagatatctatttatctatctatctatacataaattaatatgtagcaacatccttatagtggttcagttattcttatatataaaatggcaaatgtatattgttggtactatatcaatgctctggctctaaacatacattttaattttgtttccaaactagagaatactatatcactatggttaaatgggtaagcaataccaagactgtggtaagatggttaaaccgacctcagaacatctccatcctcacagtctgtgagaccactacaggtgcttgtagtaaagtgagtataatttatttttcttttatgcctaaaatgaagtagcttatgcagctttacaaaggggaaacaggaaatgctttgtacaaaaaaaattcagtgtttaacttttaaaactaataggaaaagaattattctattaagaatatatactttaatttataaagcttccaaactttgaagtgaacaatattgatgataagcagaagagaacaaactgagcttttgaaaaccaaattaatttttatacagcatgaagtataatccaagccacgttagcttctttctcagatatggaatttttctccatattttgtctttgattatcttgagaatataagaagtttctttcctatcttctttaaacatattccttttaattttttctgtagttcagatagatctgataaaataacagtgtttctgtactgaaattaagtaaaacaagtaaaaaattggttcatgaactactctgttttgaaatcaggttatatttcaattcttaataccagtttttgtaaactctgtggtaaattcaatgtgtcatttttaagattcctggtagagaaaacactgcagtaagtttaaacggttatgtgtatggtatttgggtaaagcatttttagattaacaactgaattttcaaacttctgttctggaaaagatggagtacgtgttacctgactagcttttctgttataaacaactgtaaaattgtacaaaatatacaaaacatctgttttcagatatgggacattaggaggatcatgaccataaatgctgaaatcaagtaaatgcacaaaatcaaccttgctatgactttctattcacaacacttttgagaccaaatggcaaggagatggagcccaagcaaagcaaaaagatctttgtgatctaagcagacagggagaaccagcgtttgaggctttttttggtgactagcatttataggacagggaccagagaagttggagctttatagaaaaggactccagcaatctatggagaggaccccttaagtattaggctcaatgcttagctgtgcatacctatatgtttccacactgtcttaaagaaaacaactactaaaaatttttgaagcaaatgaagaatctgcaagttgcaaagtacttagagacgttagagttctgaacaacaatagtgaagagatctccctgaaaaccctgggtattcaactgagaacccagaaagaaagcacattagaagtagggctagtctagacaccttctaatcacctttcaattacactgtaaggtatcaagttcatctgtctgtaaattaactgtctactaggacaaagtgtacatttttaaaggggaaattacaattgataaagactatcaacaatgtagcatttataatgtcaatcatatgatcaatactatatatgtagaaaagtggaaaatataacctactcaccttcctcaaaaatatccagtaaaagctgacctacaaaggatagtaatattggaattagcagacacatgttttacaagttattagaaatgataaatgttggaagtgatggatatcttaaatacactgatttgattattgcaccttgtatacaggtatcaaaatatcacatgtactccaaaatatgtatgattattatgtatcaataaaaaattaaaaatcaaggtaaaagttaagtacagtgaagtgaagaaatctcacatgtgcagttaaatgagttttggcaaatgcatatatcccgtaattcacacctcatcatgatataaaacatccctattatcccagaaagtttctttgtcctctttttcaatcagtctcagttcccagaggcaactactattctgaggtctattataaattagtttcgcatgtttttaaactgcatataaatgcatttatacaataacaaagttattagaaataaatctaacaacttagaatagctccaataaataaacaggtggaaattttagtggagaaataaactttaaaatgaaactaaaatttcaggaactgaaaaatacaatgtttgaaatgaaaacattgaatagacaattcagaaataaatacatgtgtttatagtgaactgattttcaacaaatgcatcagaacagatattagggaaaggacagcctctttagtaaatattgctggaaaactggatgtcaatgtgcagaaaaatgaaactagatgtgtatctctcaccatatacaaaattcaactcaaaatgaattaaaaactgaaccgtaatttccaaagctataaaactactagaagaaaacagagaaaatgcttaaggacattggtctaggcaaagattttatggctaagacttcaaaagcacagacaacaaaaagaaatgtaaattggtactgctattatggaaaacagtatggaggtttctcaaaaaactaaaactataattaacatatgttactagcaattctactactgggcatttatccgaaacaaaggaaattagtatatgaaatacacacctgcatctgatgtttactgcagctgtgctcataatagtagggatgtagaatcaacctaaatgttcatcaataaatgaatggatttttaaaaaagcatacatatatactttttaaaaagtatatatgtatgcttttttaaaaagtgtgtgtgtgtgtatatatatacataaaacattccattgtacatatacaatggaatactattcagccataaaaaagaatgaaattctgtcattcatggcaacatggataagtctggaggacgttatgttaactgagataagcgagtcaacacaaagataaatatcacatgctcttacgtctatctgggggctaaaagaaattgcacttatagaagtagagagtagcattgtgcttataagagtctgaaaagcttgggaggaaaggatagagagaagttagttaacagatacattacagctagataagaggattaagttctagtgttctgaagcactgaaggttgaatgtggttaataatgatttagtgtttattttcaaatagctagaaaagagaatgttgaatgtttaaagcacataaaaaatgataaatgtttgaggtagtggatatattaattatcctgactttgtcattacacattttttacatgtatcaaaatagcactctgtatttataaatatatacagtaattacatgtcaactaaaaataaaaggaaaatacatcaccaaagtgaatgtatgaagaggaagaatatttgaataattttacatcaattaaagataaaaataaagaatgaattaaagataaatttatttagtaaattacataaatttaattcataattagaaaccttgccacaaggagaactctagaagcgggtggattgcatgatggattctatcaattattaaggaataaatcctgtaattccttgtcttggtttgttttgtgctgccataacaacctaccacaggctgggtagtttataatgaacagaaacttattgactcacagttttggaggctgggaaattcaagatcgagaggttggcatctggtgagggacttcttgctgcatcatcccatgacagaagggcaaagagagggtgagagagagagaaacaaaaggaggctgaactcgtccttttataaggagcccactcctgtgataacaaacctactcccataataaagacattaatccattaatgatggcagaaccctcatggcctaaatactccgtaagattttacctcttaatactgttgcaatcacacaatcacaattaaattttaacatgattccggagtggggagcaaatattcaaacactgtatcattctttctaaggagtatatgataacatccctgtactccttagaaagtgaagaagaaagagaacatttcaactaatattataagagtagaataatactgataccacaactagacaagaaaaatacaagagacaacattttagactgatctctctcattaacacgtgtaatagtctgttttcatgctgctgataaagacataccgagactgggcaatttccaaaaaaaaataataataataaggtttattagacttacagttctgcatgtctggggaggcctcacaatcatggcagaaggcagagaggaagaagtcacatcttatgtgggtggcaggaggcaaagagcttgtgcagggaaactcccactgtaaatccatcaaatctcatgagactcattcactatcatgagaacagcaaaggaaagattcgcccccgtaattcaatcaccttccaccgggcttctcccacagccatgggaattgtgagagttacaattcaagatgtgatttgggtgggacacagccaaatcatatcagcacaaatatgagaaagtccttaaacatatcaatactcaactccagcaatataaatagaggatagtgcattgagatcaaatgaggttaatcccaggaacttaagattggtttaatattgaaaaccaatcaatataatatattaagaaaaaaagaagaattaaatatcttggtagatgaagaaaaagcaattgacaatattcaaaaccaattcacgataactttcaatataaatgaataacaagaaacatccccaatctattaaaagatactcataaagtacccccttactgaatgtgcaaacactcaccttattcatgttaagattagcagtgagataagggtatccattctcagtactatcaagcaaactttaccagaggccccactcagagtaatttagcaaggaatcagtatagtgttaggaaaggaagaagtaaatctgtatttatagataacataactgtatacattaacaaaaaagcctacaaaaaaccctagaatacaaaatcacaatttgtaaggatgcaaatggggtaaaatataaacaagtggcaagtaagtccagagggcattcaggtttctcaaaccagtcttctaacttttgtctataagtttgtacttgtttcaaaataaagaatgaagaaacaacaaaacataatttctaaatgttagtgatattaagaaaaaaaatcagttaaaataccactaaaacccttaaaactttaaatacacaattataaacttaacaaatattgtgaaataccccaatactgaatactacaacattgctaaaaggcatttgaaagacctaaataaatggaagctattccatgtttttaaatagaaaaaattaatattgttaagatattaattctacccaaatttaaccataattttaatataataccaattaaagtcccttctgattttttttgtagaaacagacaagctgtttttaaaattaatatggaaacaaaaaatacctgaacaagtcaaagtaatcctgtaaaagaataaaattgaaggagttagccctacctgatttcaagaataaataaaaagctacaaaaacctggagatgctagtggaggcataaggaccacaaataggtcaactaaattgaatggtttgcagagaacagacccacatttatatgattgattgattttctacacaggtgctaaagcagttcaatggagaaaaatggtgctgaaaaaattggcatcccgattggataaaaaaaattgatgtttgacaactcatatcatattctaaaatcaatttgggataaatcatagccctaaatttaagagctaatactgtcagtgttctaggggaaaatatgaaataaaaccttactatactgaataagccaaaaaatcattaattatgaaacaataaattggacatcaataaaattagaaacttctcatcaaagacaccattagggaaaaggatatgcaaactacagtctggaagaaaatattttgccaaatgggtatcagacaaaaacacatataaagaaattctataactcaataataaaaacacaacctcataaaaacatcaaaacatgtgaacagttacttataaggaaaagaatgaacatatgaaaaagtactcaacatttggtcaggtatggtggctcatccttgtaattttagttatttgggaggctgacatgagaggatcttttgagccaagagttcaagaccagcctggacaacaaaatgagatcccatttctatataaaaaaaaaaaaataaaagcactcaacttcattagacattagcaaaatatagattaaaattataatggtatattatacataattagaatgactacactaaaataacaaaaaactgacaacattaactgttaaagaggacgtgaaaaacaaaaattctcgttctttgcaagtgggaatgtaaaatgatatgattacattaaaataatattttagttccaaatgaagttaaacatatgtaaacacaatttttttgtttatatataaataagaagacatatatacacacacacatatatatacacatatacattcatatataaaaacacattataggctgggcacggtggctcatgcctgtaatcccaacactttgggaggcggaggcgggcagatcacctgaggtcaggagttcgagaccagcctgactaacatggagaaaccccgtccctactaaaaatacaaaattaaccgggcatgttggcgcatgcctgtaatcccagctactccagaggctgaggcagagaattgcttgaacctgggaagtggaggttgctgtgagccaagatcattccatttcactccagtctgggcaacaagagtgaaactccgtcacaaaaaaaaaatacaaaaaacaaacaaaaaaaaacccatacattataattccattacaaagtatttgcacaagaaatgaaaacatgtgttcaccaaaggatttgtaagaaatagtctgtagagaagctttatttacaatagctaaaaagtagagactatttaattgtccactaacaggaaatagactttaaagtaagacttatctacacaatggaattctacttggccatagaaacaaaatactgatacgctcaacaatatgagcgaatctcaaaaacaagtggtgtggaagaaacctcacactacagagtacataataggtatgtaatgcatgatttcaattatctgattttctaacacaggcatatgctgtctatggggaaaaagatcagaagtgattgccttttgagaacctctggggaggagcatgagttaatgttttggggaaaaataaagatcctataacttgatgggataaacttgtcaaactcatcacattatacacttaaaatctgtgcatttcactatatgtgaaaaatttaaaacatattatttaaatggtctgtgaaggagagccctcaagaggcagacatttctctttgagtagaatgatgagcatagtcgtggaaatgagatagttaaatcaaccacttgatgctcttctcattaagcttgtattactagaaaattcatctctttcttttggctagattatagattgactagaatttctccacgtatttgttaaagtgttctggatggtttttattcggctgattagtaagtcatttaaaaattggcctacaggccggctgtggtggctcatgcttgtaatcccagcactttgggaggccagtgtgggcagatcacctgaggccaggagtttgagaccagcctggccaacatggtgaaaccctgtctctactaaaactacaaaaattagccgggcatggtggcacacgcctgtaataccagctactcaggaggctgaggcaggagaattgcttgaacttgggaggcagaggtttcagtgagccgagatcgggccactgcactccagcctgggcaacaaagcaagactttgtctcaaaaaaaaaaaaaaaaaaaaggcacaggccaggcataggtagctcacacctgttattccaacactttgggaggccaagtggggagaatggcttgaggctgagttcaagacctacctgggcaacataatgagacaccatcttatttttacataaaaaattaaagtaaaaatttaaaaattagcctacatatattgtagttagagaaagcccttctagacaaagatactgtaaatatttcattgcatacagataactgcaaagataaattaaaatgctttaatagaaaatagatccagtaatcctatcatactattgatctgacaccttattgatattgtattttattctacgtatggagataaaaagactttgcattctgttaattgaaataatgagacaaacaataacaaatgaagttttgagctctcaggggttctaccaaaacttggtggtactaacaagcagtggcattggtatctattttatttctgtgctttacagatatcaagaatggttaatgctagggtgtaaatggagaataaagaaatgattcagttagattttttttgatatcttcacgtaatgaagatctattgaaaaaaaaagtgccctgaaaagagaaagtgaccaattataatgtaatcataatatggatttagaaaaagaaattagtatttaaaaacatataaataatttattattaacaatttgagatgggtacctctgcatataggaaagcccctaatatgttgttacttatctttcttaatttgaatacgtttattatagaatcatttctttcagaaaactgcaagatatttcatgtcattacatgtaaacggtattattaaagcttgttttttctacacatatttaacgaggttaaattagtctcattttgctttttgcaatatgattttggctctgatctactgcaagactgttttgaagggacacataattttgtcatttcaaatgtttgatattttttctcaaagactgagttactactgataagaaaaaaagaaggccatgattatgagtgaattgaatattgaaagaatgtccactttttagttttattcctggctgtttgcccagttgctttgaaggacttaataattttgtctcccaatgatgcctagagttgaaaagagacagtgtctggtggttcaaaacagttgaatgaggtaatcaaacagagctggaaaatgatcttctctccctggtgaggtactgctgggaattctgaaagaattcaccaaagaaaagactttataattaaattatcgtttagtccctattctctacttactcattcagattaaatcaataatgacaatgaaatctctcatggtgtttcaccagttgaagagagggaaaaaaaactgataaccgtgttttaaaaaagttaaatttatatatgctcattttggtctttagatgcttcatggagttaattgttttgtttcagaaatatgagatgacatcagatacgtggctctctcagcaggtacagtataggtggtctgtcacatcttggccattgtgaccatcctgttcacccattttttatgtgataactttctgtaaaaagtatgagtttaaggctttgctaggtttgacagagtgatcctttttcattaaaaggatcacttatgacttgggctttctatggtatcatttgtgaaaaggttacttccatttttttaggagacataaattgcagagtagctgccaggatcactttttaaaatattctgtgtaagtacactcttgtgtagatgaaggagaaaaactcaggacctaaccaaactagaaatcattagcattgttcaaattgtctgaaaaattgacctgacctttacataaattgatcatggagatattcaaataaatacttctcttcttagttgtattctagctcacaattctagtttgtgacataaatgaggctggaatcaagatgaacatgacggactaaaaacctaatcactgttacatggtctcatcctggacaattcagaaggaaacaacacaaatagcttatttaaatatagctgaattcattttactcttaactacattagtgagttttgcaaagggaaataagatgtgtggtatggtttggtttggttttctttttgttctttaaagccctcttttattttatattacgtctatggcgttaatgaccacccatattttgagaccttcacatttatccagacacttcagtgagttctgaaatatccaaatttatgcttgccatctcctcctaaatctgtaaaagtagcttcatactccccaggtctaagctgaactcattccttttctagtcagtcttcttaatttttatcttaggactcaatgacataattatccattcagatgttaaaactatttacctaatagtcatccttgaatcttttctcatttttatctatctatatataattaatatgtacagattttactttcaaacatctctcaagtcaatttacttttctctaattcacaaacactgtccatgttcgaactacagatccagcaagtctcaacccctcaggcacctgccaatctgttcacactgcaggctaactgagtgacctttttaaaatatgcatttaattgttgctactaacattcccctcatacttgcacttccacaactcaaagaacttttctctcttctttctgtccttcagataaagaccaacatccttaaaaggtccacaagggattaattgaaagctttttcagctctgagtcatagaatcatttgatctgttttctccagtctagctacatggaccctcatatgcacagggacttcataagtgcccttccttctgaacaaaattccctcaaactttcttatatgaagcctatttatttttcaaaccttggcttaaatcacctatgtaagaagtcacttcctctaactagcctaaccaaatcacatctcccaataaaagttatattaaagtcaagtgtaatctttgtgtaacacacaattattgctatgatttttttttttgctaagatacaaggacatgaggatgttttttacttctaattgtaaaccaaacgcctagtatagaattcaatatgtaagaattcaatatgtaagaagagcttaatagatacttactgagtgattaagaagaaaagtaaaaaggattataaataattgtttgtctgaagggtaggtagatggatagacacagataaatgtttgtatatatattacgagtatatgtgtctttgcacatggttatctattaatataaatacttttatcttggtcaatgtacaaaataaaatagaaaaaaaaccctgattttacagctaataatagactcacaaatttcggttagatacagaaaataagaacaatggacaatatataacacataatacttatgcattctgaatttccctccattattaaacatcttttgctattactttgattgccagtgacattcataatagtttaacatatgtcaacataatgcatgttcttttgagattatgctatctaatttttaaatcccaaatttatgaatgtttaatagaaacttttttaaaaaacaaagcatccagttattaattattcagttagtaaatgccattggtcgtttatcacagttgatttttttcttcagatgctctaagggaattttatgaaatacttagagttatatgaaatttaatgtatgagcatggtagcagtaataagaagcagcaaatttctaagataattataaatttaatagaatcatcatatactgtctttttgcatagcagaaaaggcaaagagaagtaggcatgtttagcctagctttcaaaggacttgcaattgagatgaccagtgtgtaatatatttggtcaagggaatagagtccaatatccccagcttaccatcttgtgtgtcaaaaacactgacttgtataatgtcatgaaactgagcagtgagattggcaccatctgtgtggagctgaatgtttatcaccagacattgtcaagtgttgggggcagattttttagtccagcaaggcatatgagattgtagcccccatctattccttttctgaactacttctaaggtactagaactggggaggaggcaatgtaaatggaagaatgcttatatatctgtatatgagaaaaaagctattcatcttttgatagaagtacaaagggagaacggtaagggaggagttgctatgtgggggtaaatctggtggatagagtgatatataaaactaatatttttgttcatggtatccatatattcatctattcaccaattatgagttgggacctactgtgtcttaggcaatagagctaaacagataacatttaaaatttagttcaattattaattgcctagtgaaggaagccaacaagttaatagatcaatataatagagtgcattggaagccatgataaagatgaaaacaagatagtttttagaatatctgaggagagatttcctaactagggaaatcttggaaattcttttgtttcatgagaataagtaaaaaatgagtaagatttagcagaaaaaggaagacgaaaaagttgttccagacaaaagaaactccaagagagaaatatcccacaggagcaggtgatggaacaaatagaattattgactttattatagttgaaagaagtgattcactcagtcaagtattttgtcagtatccattatatgctcagttatacaatttttccaaccttgaatggtatattatctcagagttttaaatttattacatatgttacttatattttcatgaatgttcataaggcagttaaggaaaatatccttattttactgtcaagagatgtattgtgaatgaagctaaaatcaaactgttcagtatattaaaatagttattaattgactgattcattcagtaaataattattgagctcaatttacatgatagtcactgtttcaggtgctgcagatgcagtagtgaaaaatacaagtttcctgccctatggggcttacattacagagaactacatacatacatacatacataagtatgtaaatatgagattagtgcaaaagtaattgaggtttttgccattacacggtaggtcgcaactcataattgatgaatagatgaatgtatggatacaatgaacaaaaatactcattatatatatgtgtgtgtgtgtgtgtgtgtgtgtgtgtgtatatatatatatatatatatatatatatatatatatatatatcactctatccaccagatttacccccaccattaaaagtaatggaaaaaacctcaattaattttgcaccaatctcatacatacatttatatacagtatgtacatatgtacatacattcatatacatattttgccattaagagtaatggtaaaaaccacaattacttttgcaccagtctcatacatacatacattcatatacaaacaaacgcatacatacacaaattatacgttgaatggtgttagttgctgtattagtccattcttgtactgctataagagaccaggtaatgtataaagaaaagaagtctaattggctcacagtactgcaggctgtacagaagcatagtagttattgcttctagggaggcctcagaaagcttccagtcatggcggaaggcaaatggggagcaacacttcacgtggcctgagaagaagcaagaaagggatgggggaggtgttatacacttttaaacaaccaggtcttgtaataactcattcactcactgtcatgagacagcacccagcggttactgctaaaccattcgtgaaggactcacccccgtgatccagtcacctcccaccaggccccagctccaacactggggatttcaatacgacatgagatttgggtggtacacagatccaaactatatcaggtgctatggaaaactagaaagaaaataaaaggagatgaaggatgtcagatagagttggatggtctgactttcctgatctcgctttatatagggtaataaggaaacaccttattgataaggagatttcggattagagacctgaaagagataagaggaagatccagaccaagggaatacaaagtacaagagccctggagcaggatcatgcaggaacccagtgaagaaagcaagagaatgacaaagatgagatcagaaagacagtagagggccaagtcatctaaaagggcttgaaggccattgtgcagagctactcaggacccatatcaaagcctttctttataccatatataaccacctctcgttagtccagcaggaaaaactcaatgtttcatcagataaatgtgttttcttaatgtttttcctgaagaaagagcagtatctctctctctctacatacatatatgtgtgtgtgtgtgtgtatatatatatacacatagtgtgtgtgtatatatatacataaatatatatagtgtgtgtatatatacacacacataaatatatagtgtgtgtgtgtatatatatatgtggctttcatcatttaattttcaaaaataattctattgatttaatgtgccaccagagtgtaattaaaaattatcaaatggggtcacagttgtaggtgggcatttgtgtttgtgtgtttgtggagagatgagcaataaggatggtaaatttgaattaaataactttctatagaatcctttcaatttcgtggcctgtcgtcttttgtattttcagttaatttatgaatacattatcagaaaagaatcttcaagtaagtacagttgctgaagaaaggatttcaaaaaatatgttacagaattttgtaattaaaagatttattttgataaactgatgcagatgtttgcatgttctttatctttgaaggatatttcactaaacacaatcttatgtgaagatatgacagttcttgtttgaaccaatttaaaaagtgtctttagtctgataataaatcattcatatccaccatgcacaaatttctcctatccttcccacaactcaaccacatacatatgtaatgtatcagatttactttaaaaaagtttaaaaaatagcatacattcatttttttaaaataatgtgcccattttcctaactaattataaatcaatatttggtataacccatgcaggaattaacagtagtaggcagcacagattgcatgtgcctttctgagattgttctgtgctcttctgtattttagaatgaggagcccgtgttttctagagacggcagcaaattctttatgacagtgcctgttaagcaagggggacgtggagaatttcaccacatagctatgttcctcatccaggtaagtgctggcttttttccatgttttgatttcattgtcctcatgtccccgaaggcccagttcttgtggcattctaaacctctagttcatggtggtgaaacccagccatatatacaactcacagacatcttaggaagaggacctccatccatagccatacattcaagccttaccttcccacaaaacagtctcaacactcagtacaatttaatgagttacatgtgtgtcctatgaactgagggctttgggatagagaatttaataaattaaaagcacccaacttttgaggacctgagataatctagagaagattttttattcaatgaacatatatataacctattttgtacaagtaatattctccaggtgttataaaagttttaaatactcaaaggaacctaaatgtccatcaaaaattgatggttgaataaattatggcacatccccacaagcaaatacagtgcagatttttaaaaaacaggataaaatagatgttttatgttaaataacatagatttcatgttgtaaaatataatctatgttttttttttagactttccgataaaaagaggggaaaggttactttttatctaatcaaaagaatatgaagggtttatacagttttattataaaaaaattagtaaattcaggtagttagtttaaatttgacaaggttattgagtcaatctgaatttaatttccaagagcaagcatacatgagaaaataaagcatccttcaaaatcatataataaataatctagtctcacacacaggttaaaggctttctaatgaaaagtcactgtggctaaactgggatcttcatgagtgttttacaaactagctaagagtaatttcatacttacaaaatatagaataaatataaatatggcaaagatacctaactgaccttactaattttatgtttttagaacctttaagacctgtgcacattctcaaatgattaccattatccatatacatttgtattggacagcttaatgctttagagtctcaaaatcttatgtcactaatttaaaatttaaaacttgttcagggtctgtgtaattaaaatagttgtcattgttttaactttaattttaattacgactgaaagaaataatttggaatacatacaatttccacagtacagatgtagattgattttcatagtatattattaaggtggaaaaacaggttataaactaatgtataatgtgatcctatttatgctctaaataaatgcatttatagatgcatttatatatgcatttatagatgaataaaattttggatgtttttatatctagctattaaaatgattatataagtcaggtataattaagggaactttttttatgaaactgaaaggaaatagactagcaaattactttactttataaacttttgctaattaagagtcaacttggttatcacaaatattagagaactattttggcccctaaaatatcacacttcccaaatcttataactgattatgacatttcattgaatttttaaatttcagtattttatattctagaagctctgtgaaaaatataagtagtaaagaagattacctacaaattatagatatttgtaagagatagtgaaggataggaaaagttgtacgtctttgtgtatgtaattccccaaagaagacaatctatccttgactgtaggtaccctgctgtgctttcaaatgctagatcttacccattctatctacctatatttttgtatccattattcaacaaataaataatagaaataatgtctttgtaaaagtatggcgttgggtagggttgtgatgttgacatgcaggaattaaaatatttatacacccaaaccaagaatttttttataagcctagggaagaaataccttctgtttctcagtcaaaccagcctaatatgtaggcaaattcctgtatttctgaaatgttcagaagaaaaacttaataaagttcttacattgtgtttactttgttcctcttctatatagggactataacacagccttcattgaagtagaaaacattttttttctattctggttgctgtttaggtaatttgtggtttgcctcattgagaaatgaacatgactgcatgattatttatgaatattttggcaattgattaaaattagtctactttgctaatgagtcagaagtcagtgctaggtaaatacaatttatacataactttgaacacacacaaacacaatcacatatgttattttaggaaatggtttgaatcaccttgcctcaatttaaaaatagctaacaaaaaagctatttatgaattgtgtatgactgcttaattgacatatatgcactataaaattctgaaaaattcaaacttaataaactgataaaggagtatataaaaatcacccacaatatcatcacctcatattctcacacttttaatccattattgtgtatattttacattcttttttcatgagaaatatatgattttcccctaaagattgcaattaaagcataatatagatttgtaacattaaaagaataactaatgagtgttttcttacaacatttaattgtattcctaatatttaacattttatatttttcttaaatgtgattttaatagctgctcagcattacagcaagcagatatactgtactgtatttatttatttatttatttatttatttattttttgagacagagtctcagtttgttgcccaggctagaatgcagtgacacgatctcggctcactgcaaccccctcctcccaggttcaagccattctcctgcctcagcctcccgagtagctgggattacaggcacccgccatcatgcctggctaatttttgtatttttagtagaggcgggtttcaccgtgttgcccaggctggtctcgaacttctgacatcaggtgatccacctgcttcagcctcccaaactgctgggattacaggcataagccaccacgcccggcctgtactgtatttaaatgatccaagtttattcatcattaaagttatttctatattttgatgttagaaatgattcagagttaaaagcccttataaacactttacttataattcttcccgcaaaattatatttctagatgttaaaagatacccaggcagggtatatccatacgaatgtatttgtttaggttttgatgtgtaatgccaaattggctctccaaaaaatagtacaaaaatttactgcctaaacagtaatgcatgccagcattgatgactttttaccccctttccttcccttgctgtgctacatgattctacttaaagttgtcgtgcctgaaaagtgagaaatgacaggactggggccttggcagccaacagtcagccaggtcacctttgcagtacttggcgcttacctatgtttgagagcttactagttcactcagaatatatttatttgcttgaagtaccttactaaatgaaattactaaatttttgcaaacattttgctctctcatattatcagtaagtagataaaaatcattaattagagaccaagctagacaattattgatttcaagctattttcattatggagagtgatggcggtcactacatatattttagtgggtttttttttttcctcatttacaagagctgtccttgttaaagtgattccaaaggatacaaataaaaagagaaaagaatgcatgtgttttcctccagtcttcatttaaacattattgtaattttatgtaaactacagtattgcatcctgatatgtcaaatttaaattttaaatgcacacttttcccacaatgctaaataattttgaaaaataattctttagaagattaatattgagttgactggatgtgcatcaataaccattatttgttgttctgtgtttaatttagtggcaatttgttgtaatgatagatgtcactgtatataaagcttatttatattgtggattatttctttagtattgattaacaaaactggaatagctggaccaaaagtaaaagatttctaagccctaatatatgtatttccagatcactttcagtatgaatatatgaaagcaaaatttgtgagtgttttctccactttcatatattccattaaagaaaatattaaataaaactatggcttttctggaaatctatatagctaaagaaactgttcttctggatagagtgttttgtacacgtattactatcagtttatgtacttcctgagtcatacactgatacaaaaccttttaccccagaccattaaacttttgatcacttcagatattcgcccctttgccccttgaaaaatatttgttatgttgacttcaaacttctgaattctcatctcaggaactgtaacattctacatcctgcaattcaggctgcagtgaagagataggtttttatcaaaggtatagcacctttttctctcaaagatggagtaagcagaattttcattgtgttcagtcgttcagattcataggcgtaaggaatggccctgtcaccttctaaaattgtgttaaatgaaaaattatatgtgggtgaatccattcactttctctattcagcaacacgaagttttgcccatgagagctgatgatttcacttggaacgattttaagtggcattattcactacaaatactgtggaaaacagcatgcccccaatccacaattttatcacctaatcaacccagtaaaatttttgcattaagtttcactgctgcatctgattaggacattgtctgaaaacaatgagctcatctcatgtggtgaatagatggcaaattaaagcatgctatttttaagcactacaatatttcccttatttagaaactataaaagtgaacatttaatataagaaatgtgaatgaataatgtgtaattaggtaaaaagaacatgcagggttaaacttgtattgatacccaatgtgtttccaatttgtaaatcgcattataaaaccaatatttaacttccttgagcaagataaaatctctatgaattgaaggtcacttgtctggtgtctaatgctccaaataaacactctattccaaatttccagccctcttttaagaatgaatgagctcacgacttttgttgctttttagtctgaaattaaagttgaaatattagttcaatttaaaatacattgtcatactgcctttatcaaaagtctactacagttttatatttatattcagtatttctattctaccaagttaatattgcagagattatggattcacagaaacaaagaaatgttattgtagagaaaaaatgctgttctttcctgctttgttaagtgatctttcctgtgattgcatttctgctgaaggtgcttaaaaacctaactgaagtacaaacatccccttgtgaaatctgctcaaatactgtgatatttattaagtgttgttcagtcatctaccatattctgattggtattaagattattagccaggtcaaaattaatgtgctcactgctgtgacagtcttatgtagattattagaaagtaaatctttgctattatatgcaaaatgagggttcaacttgttccccataccatatttgccctggtagattaaaagcaagcaaggcaattacagctgtttcaaataaaatcaaaaggttatatggttgttattaaggcttccaacaagagatcttttggtcctacacttgaaagtgtaatattttgaactaaaaggatcattgaagtaaatcatatataatattttttatactgtgttcaaacatttttcaaagcattgggtttttactcatggcaattttaatgttgtatctcatttgtctttaaaacacacatacacacacacacacacacacacacacacacacacaccaaaatactctgaaaaacagagaaaataattaacctagaaatctgtgggccaaaagtgtctccagatgttttcaaatattgagcaaagtttcttcacttttttaatgttttgagattattttatcttgaaattggcatcaaagatgcactaaaaccttgaaattttagtatcctgtccttggctcattcaaagcagggcctggaaacaagaaagaggagctatccactgagttatttgcctgtgtgaacttggcaataaaatgtatgactttagaactctgtgccagcctttgggttatgcagttctcatatctcacaaattgggtgtctttgcacttatacctctagtcaacaaatacttgtaaatcagtagtacgtcagatagtatacaaagaaggtgatataaagaagtcacaggcttgctgttgaccttaagcagctagacgtctagagaacttccactaagaacataaaatagactacttagggagatattgaaatgcaaatacataccaataagacagaaaatttttcaaaggaagattctgttagtacacatgtgcagtaaagtatggaatgcccttttagtttacactttcagttgtgtgggaaaatagatgttataataaaactatcctatatgaacctaattctgaatttatttttaccaaaaatgcattgaaagcattactcagctgacagattacactctctgaagacaatgaaattgaattgcacaaataacaacatttaaaaggttatacatttggaaacaaaatataatttctattcatagtttcaagaagaaatcagcaaacacttagaactaaatgagaatactacatatacgaaaatatgcaatacatataaacaacagtttttaatatatgcaataattttatatgcatatatgaaattatgtatatatccaatgtcagaatttagaaaaggaagagaataaattcaaatgtaaaagaaaggtaattagaaatgaaagaatagcacttattaatctagtaagcaaacatgaaataaagcagtatgataaaacaaatagtaagttatttggaaaaagtagttgaatctataagagctgtcaagggtaataataacttggacagttccaaagtataaataatggaaagggacaaaactacagattttaaaaatattaaaagaatactatgaataactttacattgataaacttgaagtttaggagaaatggatgcaatctagaaaaaaaaatcaaatcagatttaagaaacaatcaaaatcctccatagtgttaagaaaatggaatcagtgatgtaggattttccacatcagggaaaggttgtttttaaaagtgaatctcaccaaatattctaggagtacgcacttccaattttatattattttgaaaatgaaaaaatatggcatgtctttagtacaatttatgacatgggtatcatcttgtaaccaacacgaaattaaaacagtatcagaaaagacagtataagaaagcttaaaaatactaaaccaattattgacaagttgacttatttaatgcatttaaaaaattaactcttattttttgaacagaaatgcaaaatttacttaaaatttcaaaaatatgtaagataattaactgcatttaaattttcctgagaaaattataatcaccttaatagatgcagacataggatccaagtaaattcaacaaaatcagtattcaaaaaccttagaaatttaggaataaagggaacttctttaaggtgatgaaggcacttgccaaaagctttattcatatagcataattgataatggagcagtagtaatattccctttaaaatcagcactgagataaggaatcagagtgaagtagcttgagtatacacaacactagagataacagttgtttttgtttttagctgttgttgttttatacttgaagctctggggtacatgtgcagaaggtgcaggtgtgttacataggtatacacgtgccatggtggtttgctgcacccatcaacccgtcatctacattaggtatttctcctaatgctatccctcccctagcccccaacctcctgacaggcgccattgttcagctcccacttatgagtgagaacatgcagtgtttggttttctgttcttgtgttactttgctaagaatgatggtttccagcttcatccatgtccctgcaaaggacatgaactcatcctttttttacggctgcatagtagtccatggtgtatatgtgccacattttctttatccagtctatcattgatgggtatttgggttggttccaaatctttctaatccattctaatcagtgttctctaactacataaagtggttaaggaatagaatgatagtatttctaagaatactttttgggtcaaacaatatatattttttagacaatactactacctgttttttacatattaaaatgttggtcctataaacaccttggaagcattgattaagctaattaccttcatcaacatgaattcatctctgaaaaaaaattattgcattaaatggcaaatcttataacaatgcccatactgcaaaggttaaaatgaatacaaacctgagtatttattggagtaaagtttgttctaaaatgttttttttttttaaagctaactgtacagctgccagtcatttacatgagagtgattaaagtcctaccttggaagcaaatgctgccatcaacatggtatacttgattcaccctcacctggaggagttttctgaatgacttttctatagttgaaatgaaggcactaacctacctgccttgatctgtgtttataggaatgcatgttcattcttgagctgtggaacagaaaactgagtgttaactgagaattagagaattcgaagtgtcacaagcagttggtacattcgtgtttaccagagagatgctgtttaaatgaaaggaaaatcaatattttctatttctttgcagagtaaaagtgagcaaattaccgtgcggcatctgacatcaggaaactgggaagtgataaagatcttggcatacgatgaaactactcaaaaaatgtgagtgttttcagttctctagtcaggctgcaagttagcgttgtcaaatgccatcttttctaatagaattatgttttgcttaccatagtcctagtcaaaacaagccagccatggaaagaataacctttctttaaagacctcttccacacttcacacagagacatcttacacagagggatgtgtgtgaagacacgcacacacacacacatacactcacacacagtgattgagagaggttatgaaaaaggatgattttatcaggggaaaaaaatatgtttcctagtttgatcatagccctgtgtttgtatagcaaaacaactcctgtctgtattttgacagttttaaaaattcaagtgaagatttaatgtgaaaattcaggtgaagattcaatgtgaattcaggattcaatgtgacaatgtgacaaaattcacagatcacaaaaaatagatctgtgtctaatgcttgtgttgttttctttcctggacagttactttctgagcactgaatcttctcccagaggaaggcagctgtacaggtaagcagtgtgcaaggatctccttacacagattggcttctcaatggctatctatgtagcataaggaaggaaaggaaaaatttgaaatgtctttttcaacatggctaggaagagccaactttgctgacaaagcttcacactcttgcaccagtctctcccttgacaggactggagaaaatggagccctgcttgctccttcctgctctgcagcctccttattcttttcttcacctgcttttgcagtttcttaatatcttttttgtggcttatttctctcaactctccacatcagagagatttacgtattttccctcgtgccttcatcttctgctaagtctcattttgaattttcagtgcattaatgtggcacaggtgaaatttattcttgtacaatataatgttgttgtgaacagttagtctagtgtatcaagcaggaagctttccctctttgtcttgttgttcataaaacccagtgagattgttgcaggaggaggcatccttatttaaataaggaacgctcattgcttgctaaaataaagcaatataggggaaaataattacatttgttcaatttcccaaatgcaaaactatactcaaaaaaaggcttaagctcacacctatttagtattaaaatgtctcctcactcagagagctttcaccaggatctcacaaaaatgacttttatttttggctggcaagcaacctattaattctagactttatatacatgttctaatttccatttcacagatccatttttaaagtgtcaaaactgccatgacatattctcaggggaaattcatcatgttttaagaagtgtcaccactaattcttaccgagtagtactgactttcctttgagagtaaaaatgcatgcttaaagtaccccgacttcctctgcatcacccccacactcttatttatacacaatttgctttcatcagaagcaaccttgtccttttaatcgcctttcttaatacatcattattataagtttattctcgtggacctcctggaacgcatgttcttaattctgacttccaggaagcaaagctattcatatagagatagtgatttgaattttggattcgggatcttgatcaaagtactggtcactttttcttttggtgacctaaagcttatctttcttgaaacatacattatgattgatatcggtagccataaactgtagcttagagagatagaaacactttatatcttataaaactctcattttataaaactcaaagaaaaatgacagcatcagaagattagacttggtcaagttcagcaaatggaactgcctcaatctttcttcccattattagtctaaaatgtgatttgaatcataatgacttcttagatttgtgtgcttgtcttatctctctagtgactgaggcagaacagtcaatgtatctctgacatgtactagtgtagtcgacagtgttacaaagaaaatgtagtagcaataaattttcccttaaatagctcatcaaatgccagttggcttgactgtaagataatgttagtgtttgacccagaaaatgcaatcaatgtcttgcccaggctataaaaatgatcactggttgacttaatatatggcactaggcacccctgcaggagtaggactgctaccgtagtcattgttactttctttgtctcaaaatttgcgtctctttatttcagcaatctcataatctaaataatgagaaaataccacataaatctccagggagcttggatctaaaagctttatggaagagtagagagaaaaaggttttaaatcttagtatgtcactgaatagctgtatgcaactgggatactttctaagcttttctgtggtgaaaattgtacaatgttgtgaatgtaattaatgaaactgaattgtacacttagaaatgcttaaaatgacaaatgttatgttatacaggtttaacccaaattttataaaatgaaaaaaaatggctatggatattttataagttatcatgagtgaaactaatatgatttgtgcttggtatatattgttttgagtattataaggaaatttttggattgtaatcatctcacagtgtttcaaatatggaattgtgattttgtgaactgtttcttgtagctgccttaacacccctgttccaatccccatacctacagcgtattgcacatcaaaatcaacgtgaatattgttcatttgtaaatatacgaccaaaaatcatgtttcattccaaaatgaaattgagaccttttgtctgatcaagtttttctaaaggtattctcaacagtgttttcatccattgacctaccaaattttgcattcagacttatttattaaataaacaatttgataaatgaaatttaatcttatattaatttttcaactcctgtaaccttaagcaccactattgtaaaataaagatggtgatgactcttctttttaccacctcattatgtcaaagtgtgtattgttgttagtgttatatgtgttataatacaaatgtaacttttttaaaatcagtaatttttctgcaagtaaatgatggggaaaatttggcactgataccaaattctaatgtttagaatgtttaatttagaaaatcatgagctggatttttttgtttgacttgtggaaatgcatattccttctttcaattagtatgtattaaacattgaataatctctgtgggaaattccctttaagactttacacagaaatatctattaaaaatgcaaaaaacagtaagttaatttgagttccattgaaatcagttctttgtttatagccatacatacaagcgtacatattacatacataaaataatacataattttaattttaatagattaagaaaaatgtgtatgttttaacattactaatagaaggtgactttttatgtatatggtgattcatagtttacagtgaacctctatgcaagcaccgatgtaactcccttgtttatattatatttaaatatgaacaccacacattcaagtgcctagaatagtagcatttctataataacttcctttttctttctccagtgcttctactgaaggattattgaatcgccaatgcatttcatgtaatttcatgaaagaacaatgtacatattttgatgccagttttagtcccatgaatcaacatttcttattattctgtgaaggtaagataatacatgaattctgatataatatattttattcattgtatttggtcaatatctgttggtatcagcaactattactctagatgatttcataatcttaatttataaatttttgttaataggatatacattatatatagacttactgagatacaattttttacatattttgtatagaaataaaaaatgagaataagtcaataaacatgcacacataattaataagtgctatttgaacatgagcaactttaaaaggtgaataaatatatttacatcagcgaggccatgccacaatcataaactaatttacctagtcttcagaaaaagtaatagtctagtcttctttttaaaacaatgctttggttgttaagagatttaggatctatggaaatttaggacctgtggaaattgaattcccctgcttcagagttcttcagttctggtcaattacattcaccattattacttcttctatcttgtaacaatatgcgtagtcttacatgtttatacagtatctctacaatatattcatagaaatcattttccttttaatatggtactgtattttccagagattaaatagaactcatgtgtcctcttataatatgaagagttgagtgctactactgcagctgatatattaagctgtccttttttaagagacaatgagagatataccaagacttactttttgacattgtttttctcttgatatatgaaatgaagtaatcaaaaaagaagtccttgtttaatgacaccaggaaaaaaaaattagttttagatgggattccttagagaagtgaagtttcaagataactttttacagtaacaaattagctagtgtattttaaatatttgaagattatggttaacgtatttttaaattaatatatagttaccacccaattttaaacttttcttatggatgaactatttccaatatgcgtgctttctttttttggctgagtggcaaatagaatttgatcttggatcagtggatgaggggtgaaagggttgtgaatcagctttgtgaacatcagtggctagtctataaaagactagagataaagagaaagcatgtagaattggctaaaaacatagaaatatagaacatttgggggaagagagaatcttaacaataatctctgcaaatagtttccttctcatatattcttacccttctgaataaaacgcttataaataggaatgaaagctagttatctggtttctgttttgttatgttttaaccacgaagtgcttccatttggggggaaaaaactattatgtaaactttctaatgattattacttagacatctttaaaaatatttatacacatatttttaaattccaggtccaagggtcccagtggtcagcctacatagtacggacaacccagcaagtgagtacacaagaagacaattaagaatagttatggttggcattagtcttagacatcgtgttatctattctgagtcatatcctctataaattcttcttcaaaaaatccccaccatgaggaaagctgcgtgtataccatcaacttgaccttatgtatgtaagagaaacagtaaagcaagagatatgagccatgttacaggtgggaggtgaatcttatatgcccgaaataggatatctactacctaagtcaaatagagttattgatgaaacaggtacattttagcttactggcctcttaatgttctggttcattcttgcctgggcctcacataagttattcctccagaataaccttttgaagacatttcagaaaattatgaaaaatgtgttattttatatattttctatcctgtttgttccagatatccaggttcttctagttttgtatatgcactttttcatttatgaatttattcatttgtatatttgttaggtttgttaagagatcacctacttttgtcaaacaatgtgacagagtcggagggtacactgaaagagtgttttgttcaagaacttacagtaaagtagataaataaatgcatggttgagcttatcttaaaaatgaataaccagatttcatcctgccttcctttctctttcctttcttccatgtttgtatccttctttcattttttaagttttatttaatcaatgcttctattctgtgatgatttcacataagctactataatctaataatggctcatatttattgactcacttgaactttggaatacctctgagatagttaatttgattatccctttttacaggtgagaaaaattagtctcaaagaggttaagtggtaataacttggccagagtcatactaataaatggcagaaccagggatcaaatgagacagtctgactcgagaataggtttataattcactacaatataataactactttttctattgtgcttttgcctcatgcattgcatactcttatttaagtaggagtcagttaggtggcttgacttagaagatatataggtaaaaaagtgtaaggttgaatgacaaatatcattttgagaaaacagaccaagaccatttatattgttcaaataatgtcatatagacacttagtgcatgcccgaggcaacaagaaatttctaaatttgtgttgggtttttgtgtggctgaaagatggtttagcacacattttagtttctatttatttcattatttccgtcttcagtgtaaaccttaaaaagattatgttaagcaaatcaaatatattcaatattaactctaacggcaacaataatgaccatagacagtacggttgataaaatggaaagaaggttgaatctcatagatagaactatcagtgtataaaataagtctatcacatgctttttgtgggatccaagacagtgcgttaacatctcaaaacatcagtgtcctccgagacaaataaacaaatgtgtttgcagtgaagatgagtaacattcatgacatataggacacacttaatcaataactatttgtgttacactgtatatcttgcctttaacaaaggatgattaaaaattttccaatctgattttaatttaattttatcctgttgttacaaggcaatgtcttttctaataacttctgctgcaaattacaaaacatttctgtctaagggaaatcatgttattttcctgttcaaaagccaatcatgtttgtctcaaggtcaacaaaaacaaaaaaaggctgtgaatagtggtcaagtgcttaattttcttttcaaaagataattacttagggagataaaatttatagtcaatggcaagtaaatctttgggtcaatgaaagcaaatataccaatgagtaagtcataactcatttttgggccacatgaagtagaatagtgcatggagagaaaattttaaaaaagaaaaaggaaaatatttaacaagcatggaaaacctttaaacccactagttatcaaagaaacgcagaagaaactactgccatgtaatttttcctaacaaattaataacattaaaaatttacattactaataaagatagaatgtggtagaaatgttaattataacatattaaaaataatagtcaaaacttatttcttttgtttttttgagacagaatttcactcttgttgcccaggctggagtgcaatggtgtgatctcagctcaccgcaacctccacctcccaggttcaagcaattctcctgcctcagccccccgagtagctgggattacaggcatgcatcaccacgcccagctaattttgtatttttagtagagacggggtttctccagttggtcaggctggtctcgaactcacaacctcaggtgatctgccagccacagcctcccaaagtgctgagattacagccatgagccaccatgcctagcagaaacttaattcttttatatcattttttcatttttgtagtttacactgagaaaataattctaaatggagaatattatgacaaagctattgaaaatagaaaaagacattataaataacaaataatgggagtttgtaagtacattttaatggaatattactcagtgccctgggcatcttccatctgtttttccagaaccacttttaactctcaattcttctcttcgatgttctctggcctagaagtactttctatagatgacttaggttctgttgccccatggcttccaactggattcaaccaaaggaaatcttgtaggcaactggaaagagggagaaaactgctctgggttgtttattccaccagccgtgttcctatggagtcaccacaggttggctgtgacctttggctgaagggaatcttcacccttgaccttcaggcccagccactgttttcttgaagttttctcttttcactgtgtttctgccaggttttggtatcagaatcatgctgacctcatagaatgagttgggtaggaatcccttccccttgattttttggattagcttcagtaggattagtagcagctcttctttatacatttcatagaatttgaatatggatccatctggttccagcctttttctagttggtaggctttttattactcatttaatttcataaatcattatcggtctgttcagggtttcaatttctccctggtccactcttgaaagggtgtgtatgtccaggaatttatcaacttcttgtacgttttttagtttgtgggcatagcagcactcataatagtctctgaaggctttttgtatttccatggggtcagtggtaatgtcccctttgtcatttctgattgtgtttatttgacttttctctcttttttcttaggctatgtagcagtctattaattgtatttatactttcgaagaaccaacttttggtttttatgctttttcacgtattcatttcattcagttcagctctgatgtgggttttttttttttcttcctcctgtagctttgggattgatttgctcttgtttttctagtttctctgagtgaatattcaccattttttaagcatttaaaattaaatgcttaggatagcttctttggaaatacactaatgtttaaataatcagagtttctttccattttaaacatgtaaaaaacctcttagaacatctagtcttccagatatatataataggggaagatatttacttacaaaagaggtagtttgatgtgcctgaggttacacatagacagcatagtccaatgggagaaacataaaattacatgcttataacagtctatgattatttctctagtaaaagtgcacacagttcaggacaagaggaagtcaatgagaagacattttcagaaaaacgaatgtgtgtatacaaacataagaacgcataaaagtgttcacatttgcaagataaacattgttcatcatagctggaacaaaacatttactaaaagagcaaaactatatgaggccagaggggcagactggaattggattataactcttatgttttctaagtagtttggattcaatcatatttgttcaatgataaacctttgacattttattttattttttttctggccatggagtaactggaaatagacctgattcccttgtttcctttaataataataaaaaaaaagagtaaagaaaactggacaaaatatacaaatcaactgtttccagacattcaacaatagccagcatgggtctctgatccctgaaagaaggaaacaagtacaattagtgttgtaagttctctggctttcttgttaatagaaatttctgaactccaatgcaataaggaataagctaatcataatacaatgatatctctgagttgaggagacagaaaatgatattcagaaagattgaggcttatggaatgttgaggaatggtatggaattttatggaattgaggcttatggaaagatgaaactggaaatgaagaagccacatggagaaagacatctgcatagggctggaagagggatcaccctgaatcagctgctgaaaatacctagctgagtatgcataggaagatgcttcatgagtgtgggcaatgccggagctcacagagtggtgggatttgctcaagttataatcagcacagtagtggaacatttagaagagatcccagaagtgtcctgccttttgtagtgctaaactagccatagagcaaaggtcattcaaatacacactaaaaagatttctttaaaagtcttgaaatggtcaacctgcctgcaacatatgccagaacaaagtccaacaattgttagaagatcacaacaaaacccaggctttcaaaatgtaaatgtcacaatggttggtatctaataaaaaattactagctttgtgaagaaagtagaaaatattactcataaataggagaaagattagtgaatagaaacaaactcagaaatgacagagatgatggaaatcactggcaaatacagtaaattagctgttacaaatacataaagccatcaaggaaagaatgaatgtagagagaaaacaaagataatatatttttatgaaagaactttgtgaatttaaaataaaatatttgaaatataaacttcactggaaaatactaagaacagattagatgctgcagaagaaaagatcagtggacttgaaacaatatcagtggaaaatttcttgacacaaatagaaaaggaatgaagaaagtagaacctaaattaaccataggccagtatctacatctatcatatttgtaattagagtcagaatggggcaaggaaacttgcaaaaaatatttgatgcaataacggccaaaaattttctaaatctgatgaaaaagttaaaaaaagttcaacataacggaagcaggataaatgtcaataaaaccacactagcgcacatcattagcaaattatgcaaaaccaatgataaagaaaaacattttaaataatcagaaattaaaagacacattacatccacatattatgcacatagtaaaaacgaatgactacagacatctcatcagaaaaaagcaaactggaagacaatagaacaaaatgctgcaaatgctgacggaaaaccaaactgaactaaacaaaaattcttaatagaaaaacaaacctagaagatatttctcacttaaaaatgaagacaaaaagaaagtttcaataataaaagaagtgagaacgttctgtcatcaaacttgctcttctaaataacaaattgatcaataaaaactaaataattagaaaatattttgagctgaaggaagatgaaaacacatcagattccaatttacgtgtaactacagctgtgattagaaagaaatttatgactctaacttattatataaaaataaaaacacaacagatcccaatttaggggttactacagttgtgattagaaagaaatttatgattctaacttattgtataaaaagaaaaggtttaaaatcgataatctcctctttcaccttaaggaattagaaaaagaagagcaaattaaaacaaagttgaaagaaggagattgaaaaatgactaagaaggaaatgatattgaacatagactagcagtagagaaaatgtatgaaaccaaaagttgcttccctgacaagatcaataaagttggcaaaattctagtgagagacatgaagaaaaagagaaaaatgtaatgccattaataaaagagatgatgtttatacaaatgctatagatattagaatgacaatagtggaacattatacgtaattttttgccagtatattaggcatcttagatgaaatggaaaaattccttaaaatacacaaatcactaaacattcacacgagaagaaatacagtatataaatatgcaattaacattctcctcacaaaggaaactccagatgcagctagtttcactggtgcattttatgcaacttttaataagttaataccaagtttacacaaactctttttaaaaatataaggcaggccaggcgcggtggctcacgcctgtaatcccagcactttgggaggccgaggcgggtggagatcgtgaggtcaggagatcgagaccatcctggctaacacggtgaaaccctgtctctactaaaaatacaaaaaattagccgggtgtggtggcgggcgcctgtagtcccagctattcaggaggctgaggcaggagaatggcatgaacctgggaggcggagcttgcagtgagccgagatcgcaccactgcactcgagcctgggcaaaagaatgagactccgtctcaaaaaaaaataaaaaataaaaaataaggcgagtattgaccagattccaaatccagacatatatattaagaggacaaaaaaaagatcaaattttctcatgaatttaggtgcaaaacaccttaactaaataatagcaagtcaaacctagcaattatagaaagtatgatagtttgttatggccatattgggtttacccaaagattctatgtttgctataaccttcaacaaacaatgtaattcaccgtattacactgacacctcaaaggagtttttaaaaacttgaaaattttggcaaacaataataataataaattaataggaatacctaatcaagataagatagaaaagaaattcctgaacttcatgaatgatatctgtaaaaatactacagctgacatcatgcttaatggtgaaagaatgatgctcctgcctgaggactgggaaagtcaagaatatttgttctcactccttctgtgcaacattgtggtagaggacttagccagtaaagtgggtaagacaaagaaatatatgcagtaaaactgtgtttatctgcagaagacatactgtgtacaaaacaaaaaggaaggaaacaaaaaattgtggaatatacacacaataaactattgaaaataagtgaatttatcatggttacatctgtaggccaatacacaaaattcaaccatttcatcaatgaaaatgcaagatttaggagtatttttaaaatgctgtttaaagtaacatcaaaaatccatggagtatctaggaataaatccgataaaaatgaatacctcctctaaaatctgtataatactgctgggagaaattaaagactcagatttctacagacatagacttgtatatatctgtatacaatatgtacacatggatatatgtgtgtacaatatgtatatatgcaaacatatatgtgaatgtatatatatggattagaaggctattttttttttttttttgagacggagtctcgctctgtcgcccaggccggactgcggactgcagtggcgcaatctcggctcactgcaagctccgcttcccgggttcacgccattctcctgcctcagcctcccgagtagctgggactacaggcgcccgccaccgcgcccggctaattttttgtatttttagtagagacggggtttcaccttgttagccaggatggtctcgatctcctgacctcatgatccacccgcctcggcctcccaaagtgctgggattacaggcgtgagccaccgcgcccggcctagaaggctatttttgtgatgtaaagtctctccaaatagatctataaatttaatacagtgcacgtacctcaaaattccagcaagttactgatgtccacttcatgttttatcaaattttttgatgtttcatttttgctatttctctattactgtattttcaaggtcattactcttttgttcttcagtgcctaatattttattaatatcacccagtatatttttcatcttagatcatataattttcatgtatttcagattctgcagtttttatttttagaaatatataacatgctcatgctttttctaccttattaaatacctgaactacaatccaggtgtcctcatcctgtgtttctgtatcccttttaattggtataggtacctaggtattgtgaatcgcatctcatttggtgctagataatcttgtattttgctaaaatattcttaagcaggttaacaatatgatcagatttgcattttgaaaacgtaaatgataaatttaatatagaagcaaatgaaaaagttttactggcctaatgaagcttacttagaaaactgttgtagtaattcaaaagagaaatgatgagttaatcagcacagtgcctgccaaatggtaacaagtggataattttttgttgtgtcacactgattctgtttaatgcataggggttagctatttacactaccctttttggtttacagaatattttatattggaaagcaattctatgctgaaggaagctatcctgaagaagaagataggaaagccagaaattaaaatccttcatattgacgactatggtaaaattttgtgcatgctatgttattcaagaacaactttctctgcgtcttatagttttacctgcaaatgactctccatctttaatattttgctctttctttaaaagaacttcctttacagttgtcccttcccaaagattttatggaccgaaaccagtatgctcttctgttaataatgtaagtattttatttgtttttaaaataaaggaatctaaagattttatatttttgtgtctcacatgacaacatttgattcaataaagaagagaagtcctatgtgtgtagttaatcaggacagctgtctgttgtctaaattcctctagaagtccatcactaaatcatgtataaagatgtgtaaatttttttgaacttcttgcatcccacatggagtttggtgctactgccaggaatagtgacactaaatagtttgatttgtgggtgtctgcttagcaattactcaagccctgcgctctttatcagttgtttatgcaacattgtggaacatgtaattccactgctaaaacaatgggttatgtttgtatcactcctattgatttttcctcctgcatgcatggcctgcagtaagctgctcctatgctcagaaaacttgactcaagtttttttcatcttgaaattgactttgaagttaaatatctttatacattttgtaaggctatatcatgactatatagtattaggcaccgaggcccctaacatctaatgcgtaactaacttgatattgatttagcattgtattcctgagagttataagttatttcccttattaatatgatcaggtagcatattgatataatagtgcttaaaacagtctaaaattatatctttagatacaataatttcttcagatataatatttagaaatagtaaatatgaaaataacattgcttattatgatcactgagtatagtggataagtattcagtctgtggaatcggatttcctgggttcatattctagttttgctatttattagctgtgtgtccttgggcaagttccttaacctcctacaaggctaagtttctctaaatataaaacaatcattacaatacaacctgtgttttaagactgctttgtagactgagtgaaatacaacatataaagtcccttaaacagtgcctaacacatatgattcttataattattgcgattataattcttttttgtatagactgcatttattttatttagatattttaatatatacaagcaatttgtccctttattttaacaaaccacataatacagaaataatataatatttaattttctctctcactctagtgttcatttctaattctaattattgagctttatatagtttctcatatccaaacttttctcccttgtccctaaaagccagaaagctctgaaagttcttaatgtctccttgaggaagttcttatttgctgtttcttaattcattgtttttttttcttgtcttttttacctagtttcttctggtctattttaactgtatgtatgatttactgaggaaaaatgtttaaggcactaaaacgagacaaaaagaaagcaaaaatcaaacccatcttctatctcagtcacgtctccctttggtaaaaggaaatgttcttttgattcactgaaaaataaactttctcaaggaagggacatccctcaggcacatcctaggcatccctcagtatgtgatgaccttcaaaatggaagataaaagaactgactgcccttgaagcatgatatttatgcagacgaatgtgtagataattatgcccacttgcgtatccacctgctgtagggcagtgtcacacatagggggaaaaccgaataagagttaacagaatctctttgttttctgaaacagataagctaactggctcatcttggcatcagacttgtgttttgttctggttgatttttagtttataagaggaatataaggacctacacaagaaaccaatttgaagacttctcttattggcaaggggcacttggggttttttttgagaagtgggattttggagcaaaatgctggttttggagtcaggtaggactgggttcaagttggagtgctgagatttaacaatacactgctgaattttttgaatcttctgttgccttataaataaattggggaaaataacatgggataatatttctatttaaatatattaccatagtttttggtagagcataagcacttgcagatagtctttaataaatcataagcagaattataattattattagtatggtgcaaaagtaattgcagtcattataaatggcaaaattataagtaattgcattacttataaatgcaaaaactgcaattgcttttctgccaacctaatatggataatagtattttaaagtatttaatgtgattaatataaatatttaatgtgtaatttaatgcccataaagttattcaatagacagacactactaaaatagataaaatagtgccgtcagacccatggaatttactttgctacttttttggttgatacaggaagaatgaatgaaaatgagtataaaatcatttctagttatactttgttatatatagttatatattgtttatactaaatattaattgacattatccacacttttgggttttagagggaaattatcgaaagcgtcacagaatgtgacttacaaaatccaaaaggagaatttctttttttttaaatttatacttacaatatgatctattcttttaaattgcatgattatttctaaaacactatgcttgaaaacatataagggtcagaatagcaaaagtagaaagtgttttttaagaattttaaaaactgcccatgatttaaagccatattttttctcaagcttaaaaactgttttcagtgacaaattgacttcccattctaaaagtaataataattattatttttttcgcaaatgagcaattagacagtgataaacaatagagcgactattatttaaatgagtctaagaggtcattcagtgattttggtgtcagtactttattgcaattttgtgccatatatctggtagccaacagaatatgagccatttcttgatctgtagtgatgggtttacatccaaggaattatataatgaatgcatgagttagcgtcaggctgcagcaagcacctgagtggctgaaagaaagactgccctggaagaaagtggcctctggcaatttggaaacccagttctgctcagtcttcattatggatcttcaaaagaaatggtcctctgacctcccttgcttggtcatatgttttgaaactcaaacttaatctcgtaacatttaaaatgtaagtgaatcaaagatcaatgtcaatgtcacattaaaaagagtatgcgggatggagtacataccacattaatatttttactgtagaatatttttaccataatggaaaaatctaagaagcattggcaccatagatggatctcagtgacctgagtttgctgtggtctctacggagtcatgatcccctttttctgaacaactcctccaattctcccttcaagtgcctatttgttttactcctgcctttctgtttaacattatagggagcccttaaggacccggagtccttattcatttttaaacttattctatacacatctgtattcattccagctcttataacctcgtattgttcttttttaatattattcttacttcctactcatgtttatgtaatttaataccatacacgtctaccacattgcttttacatatgagaagccgtgttaatggctatggggagataacaagattgcaagcatcttgaagtctataatagttatttgggtttgttcagtctatctccgcaatgcctaatacacagaacttactgactatcctgtaattaccaaatagtgccaagactgaaggtgttgtggaaaatgccctgcacttgcagacgttcatttggtaaacaaacaaatatgaatctaatatacttagatgctgataaaagcaatccagaaggttgtactgttatttaaaaagaagggatttttgtttttgtttttattttctgtccctctgaagaggagcagcatcagctcaggagtttatttcagtaccaagggcccgtcatctcttcccattttctactttttcatgctcaagttatcttgccacactcgttaaaggtctaataagggaggcagtaaatgttcaacagattatattaacttccagaatgcaacatatgctatcttgcctccatgactttctttcctttctctgaattcaccttccttgaaatcccaagaaattcatggtcatccatcaagtcttatcttcctggagctttcttccattctcctcctctgtcagcctatggatcaggtcattctaaccggagagcattattcatttttatctagagtctcatcactgaatgttctgtgtatcagaatcctataattgggtcatcttggtagaagtgatctgttttctatataagtattctttcaaacagcatgatataagtaactgatcattcacaatgagggaatatattcagttattcatatccaacagtcaagataacatcattgctggtttgttatacacacatttcatttcctcaaacaacttgaaatattgtttaatattttaattagcatcaagcttcagacaagtcagacatcctatctggatgactgaactctaacctgctatactattctctacttacacttcctttctttagtttattgctttttgctctctctctcttttagttgcttttccactctgctgctaggttgaacttggcaaaatccatatctgagaatgtagccctcctatctaaaatcttctcattattcattcatcattgattaaagctctgcgttttccctcacactacgtaacagtcttcatgatatattttctatttttctcttcgtttttatctcacatcagccacccccaaagagaaatcccatcctttagacagactgctttgttctggggaacaccaccacttcaatcatcacttgtgttttcacatagcctcccagtgccctgagtttgcctgcccacctggagaagttctcttaagacttccagacacacttccagataactttatgcacaccgctattacaaacatgtaaccataccagattacaacatttactttgctttctctcctgttaaactgccaattccttttgaatagttttgccataccgcactaactggagcattatttgatagaataaatgaatgaatatatgaatacatcaatgaataagtaaacaaatcaattaaccctgagtttgtcctcaagaatgaattaagtcgagatggagaaatggagaaataaatgatttgtgagtttataattgatttctgtatgggtccatttctctgcaatttagttttgtactcagaatgagacgcgagtttctaatttctcttatagtctttctggatagggctgaatattgattgattttcatgctgtctcttcactgtttctttttacaatttttttacttagcttaagataataagaattgatattagctaccatttattgttattgtgcaaagagtgtcttgctgagaatatttagacatcatctttagtccttatagaaatcatccaaggtgaatactactgtcctcatgttaacacaaggaaactataactaaaataggtcatgtatgtgttcccccaagttcacagaaggaaaagttaaggtttggactcaagttttatatatctattttctgtattaaaacctctgctgtattacccaatgctgcctgcctacatagtccaccgtattatgataattattggcatattatcaaagaatgatgacttgaatcagaagaggcttctctaccgccaaattcttatgaacttttcttctttccactgaacagtttataatagtttctggaatataacattttccacatgtactatgttaatgctttggtgtaaagtattgattatacaaatcatgactgagttcatgaatattccacaagagagatcaaattctcagctcagattatttaataaaattctgaattctcatcaaaatgttcactttgtgggaagtcttttctactctgtatttgtttcatagattcctagggttttcgcagatcagattgtgagaggtgagttcattttgtttcccaaggatgaagacatatatattccaataacttccaacatcatttgatcttctatttgttcatgccaaatacacatctacttttaccctcagtttcttgcaaaaatagtacatataccgtctgatgtgggtgaaagagatagcttgttgatattaatgtttgtctcaaagagggattattattgctttgccatataatgaggttcaaagcttaaattttaggtttatcatttttgtatctttgtcatttacatggatggagaatgtacccacactgtaatacatagaaaatgactaagaagaaaaaaggcagtggcatttaatcttgttaatagaaggggagaaggtgatcatttgtttctgtttttttcttgaacatatttaaacttgttctttcacaatttgtagataatgcatcttaaatgtcagcattaacttcttaccactatttaaagttgtacaaactcaaacttgctgtattaagaaggtgacatgggggaaaaacccaaatttagataaatttatagataatgcctaagctataatatttgtttggtgtttattttaactggaatatatatatatgtgtatatatgtgtgtgtgtgtatatatatatatacacacgtatatgcacacacagaaacacacatgccattttaggtcttctgttaacataggttttagatatgcatggattcacagaattatatgaatgatataatatggtttcatatgaatgatatgggcttattaatagttcctatttaaaacttacatgtatatgacatatttacagatacactactgaatactttttataagaaatattgaacttcgtaatttacaaagttcttagttttagatggtcatataaatgtagtcattaatgtaagggtaattcatattgaaatcagtctctttttctgttttaattagttatttgtttttaagaaaaaacatattaggatataagattaactatattattagtttaacatgactttgaaaggtgaagttaaaaataccaagatacagtgtattctttcttggtaatcccacacatctccacatcagaggaatacatcaatgacattatgttattccaggattttttaaataatatattctttccttttgacttatatataaaaacagtacattatgaatcatgtaaggctgtgtagcatgtaagtcaaagtgtgtctatgatgatgggaggctaggccagagctccaggcttttctagtccaacatacatatatttttgagcaacaagtaatgtgcaaagttccctactaaaaattacagggcttctaggagatataaaacttgggaagaaactaataattattgtatttttaaaagaaaaccacaacccaaataatacaattgttattaatatagtaaagttttaatcaacgttttgatttggaatcattcagtcattttcagcatcggactttagcacttgttcttcctcttggagggcattctcttatagccgttttttctcatttttagcatgccattttaatcaaaattataaacctgatctagctgtagccttcttcattaatccactatctgagtccatgtctttgtagcctgtatgattagagctctcagttgtcacctgtccctcagtaacatggaggaagcataatcaattggaagttgctagatcagccacaactcaccctaaaaaagtgcttccgttgatttttagcttttttattaaggttccaatatattgctaagactttttccttacttataagaaaatgtggctctgatttcctctagacattaataccttgggaaaggctgtgtctgcgccactatgacagtgcattatactgacataatctccctgtttttcatcacatagaaaacatgtcatacaagataaatctatgttgcacaaaacatgctgcatctttgggaattaaaagtgttgaaaattatattgatacatatatgttaatgtataggttatatatattttaatttataagggcacacaaaaaaagtccatctatataacatgtagtttacacacttcctatgcttttattttttctttttttattaatattattatactttaagttttagggtgcatgtgcacaacatgcaggtttcttacatatgtatacatgtgccatgttggtgtgctgcacccattaacacgtcatttagcattaggtatatctcctaatgctatccctcccccctccccccaccccacaacaggccctggtgtgtgatgttccccttcctgtgtccatgtgttctcattgttcaattcccacctatgagtgagaacatgcggtgtttggttttttgtccttgcgatagtttgctgagaatgatggtttccagcttcatccatgtccctacaaaggacatgaactcaccattttttatggctgcatagtattccatggtgtatatgtgccacattttcttaatccagtctatcgttgttggacatttaggttggttccaagtcattgctattgtgaatagtgccgctatgaacatacgtgtgcatgtgtctttatagcagcatgatttataatcctttgggtatatacccagtaatgggatggctgggtcaaatggtatttctagttctagatccctgaggaatcgccacaccgacttccacaatggttgaactagtttacagtcccaccaacagtgtaaaagtgttcctatttctccacatcctctccagcacctgttgtttcctgactttttaatgatcgccattctaactggtgtgagatggtatctcattgtggttttgatttgcattgctctgatggccagtgatgatgagcattttttcatgtgtcttttggctgcataaatgtctttttttgagaagtgtctgttcatgtccttcgcccactttttgatggggttgtttgtttttttcttgtaaatttgtttgagttcattgtagattctggatattagccctttgtcagatgagtaggttgcaaaaattttctcccattctgtaggttgcctgttcactctgacagtagtttcttttgctgtgcagaaactctttagtttaattagatcacatttgtcaattttggcttttgttgccattgcttttggtattttagacatgaagtccttgcccatgcctttgtcctgaatggtgttgcctaggttttcttctagggtttttatggttttaggtctaacgtttaagtctttaatccatcttgaattaatttttgtataaggtgtaagggagggatccagtttcagctttctacatatggctagccagttttcccagcatcatttgttaaatagggaatcctttccccattgcttgtttttgtcaggtttgtcaaagatcagatagttgtagatatacggcattatttctgaggctctgttctgttccattggtctatatctctgttttggtacgagtaccatgctgttttggttactgtagccttgtagtatagtttgaagtcaggtagcgtgatgcctccagctttgttcttttggcttaggattgacttggcaatgcgggctcttttttggttccatatgaactttaaagtagttttttccaattctgtgaagaaagtcattggtagcttgatgggaatggcattgaatctataaattaccttgggcagtatggccattttcacgatattgattcttcctacccatgagcatggaatgttcttccatttgtttgtatcctcttttatttccttgagcagtggtttgtagttctccttgaagaggtccttcacatcccttgtaagttggattcctaggtattttattctctttgaaacaattgtgaatgggagttcactcatgatttggctctctgtttgtctgttattggtgtatgggaaggcttgtgatttttgtacattgattttgtatgctgagactttgctgaagttgcttatcagcttaaggagattttggcctgagacgatggggttttctaaatatataatcatgtcatctgcaaacagggacaatttgacttcctcttttcctaattgaataccctttattcctttttcgtgcctgattgccctggccagaacttccaacactatgttgaatgggagtggtgagagaacatacctgtcttgtgccagttttcaaagggaatacttccagtttttgcccattcagaatgatattggctgtgggtttgtcataaatagctcttattatttgagatacgtctcatctatacctagtttattaagagtttttagcatgaagcgctagtgaattttgtcaaaggccttctctgcatctattgagataataatgtgatttttatctttggttctgtttatatgctggattacgtttattgattttcgtatgttgaaccagccttgcatcccagggatgaagcccacttgatcatggtggataagctttttgatgtgctgctggattcggtttgccagtattttattgaggatttttgcatcaatgttcttcaaggatattggtctaaaattctctttttttgtagtgtctctgctcggctttggtatcaggatgatgctggcctcataaaatgagttagggaggattccctctttttctattgattggaatagtttcagaaggaatggtaccagctcctccttgtacctctggtagaattcggctgtgaatccatctggtcctggactttttttggttggtaagctattaattattgctccaatttcggagcctgttattggtctattcagagattcaacttcttcctggtttagtcttgggatagtgtatgtgtcgaggaatttatccatttcttctagattttctattttatttgcatagaggtgtttatagtattctctgacggtagtttgtatttctgtgggatcggtggtgatatcccctttgtcattttttattgtgtctatttgattcttctctcttttcttcattagtcttcctagcggtctatcaattttgttgatcttttcaaaaaaccagcttctggattcattaattttttgaagggttttttgtgtctctatttctttcagttctgctctgatcttagttatttcttgccttctgctagcttttgaatgtgtttgctcttgcttttctagttcttttaattgtgatgttagggtgtcaattttagatctttcctgctttctgttgtgggcatttagtgctataaatttccctctacacactgctttgaatgtgtcccagagattctggtatattgtgtctttgttctcattggtttcaaggaacatctttatttctgccttcatttcgttatgtacccagtagtcattcaggagcaggttgtttagtttccatgtagttgagcggttttgagtgagtttcttaatcctgagttctagtttgattgcactgtggtctgagagatagtttgttataatttctgttctgttacatttgctgaagagtgctttacttccaactatgtggtcaattttggaataggtgtggtgtggtgctgaaaagaatgtatattctgttgatttggggtggagagttctgtagatgtctattaggtctgcttggtgcagagctgagttcaatttctggatatccttgttaactttctgtctcattgatctgtctaatgttgatagtgggctgttaaagtgtcccattattattgtgtgggattctaagtctctttgtaggtcactaaggacttgctttatgaatctgggtgctcctgtattgggtgtatatatatttaggatagttagttcttcttgttgaattgatccctttactattatgtaatttccttctttgtctcttttgatctttgttggtttaaagtctgtttcatctgagactaggattgcaacccctgtctttttttgttttccattttcttggtagatcttcctccatccctttattttgagcctatgtgtgtctctgcacgtgagatgggttttctgaatacagcacactgatggttcttgactctttatccaatttgacagtctgtgccttttaattggagcatttagcccattgacatttaaggttagtattgttatgtgtgaatttgatcctgtcattatgatgttagctggttattttgctcattagttgatgcagtttcttcctagtcttcatggtctttacaatttggcatgtttttgcagtggctggtaccggttgttcctttccatgtttagtgcttccttcaggagctcttttagggcaggcctggtggtgacaaaatctctcagcatttgcttgtctgtaaagtgtttttttctccttcacttatgaagctcagtttggctggatatgaaattctgggttgaaaatgcttttctttaagaatgttaaatattggcccccactatcttctggcttctagagtttctgccgagagatccgctgttagtctgacaggcttccctttgtgggtaacccgacctttctctctggctgcccttaacattttttccttcatttcaactttggtgaatctgacaattatgtgtcttggagttgctcttctcgagcagtatctttgtggcattctctgtatttcctgaatctgaatattggccttccttgctagattggggaagttctcctggataatatcctgcagagtgttttccaacttggttccattctccccgtcactttcaggtacaccaatcagacgtagatttggtcttttcacatagtcccatatttcttggaggctttgttcatttctttttattcttttttctctaaacttctcttcatgcttcatttcattcatttcgtcttctatcgctgataccctttcttccagttgatcgcatcggttactgaggcttgtgcattcgtcacgtagttctcgtgccttggttttcagctccaacaggtcctttaaggacttctctgcactggttattctagttatcctttcatctaatattttttcaaagtttttaacttctttgccacgggttcgaacttcctcctttagctcggagtagtttgatcttctgaacccttcctctctcaacttgtcaaagtcattctccatgcagcttcgttccgttgctggtgaggaactgcgttcctttggaggaggagaggcgctctggtttttagagtttctggtttttctgctctgttttttccccatctttgtggttttatctacctttgttccttgatgatggtgatgtacagatgggtttttggtgtggatgtcctttctgtttgttagttttccttctaacagtcaggaccctcagctgcaggtctgtcggagtttactggaggtccactccagaccctgtttgcctgggtatcagcagtggtggctgcagaacagtggatactggtgaaccgcaaatgctgctgcctgattgttcctctggaagttttgtctcacaggagtacccggctatgtgaggtgtcagtctgccccttctggggagtgcctcccagttaggctactcgggggtcagggacccacttgaggaggcagtctgcctgttctcagatctcaagctgcatgctgggaaaactactactctcttcaaagctgtcagacagggacatttaagtctgcagaggttattgctgtcttttgtttgtctgtgccctgcccccagaggtggagcctacagaggcaggcaggcctccttgagctgtggtgggctccacccagttggagcttctgggctgctttgtttatctactcaagcctcagcaatggcaggcgcccctcccccagcctcactgccaccttgcagtttgatctcagactgctgtgctagcaatcagcgaggctcggtgggcttaggaccctcccagccaggtgtggggtataatctcctggtgcaccgtttgtgaagcctgttggaaaagcaaagtattagggtgggagtgacccgattttccaggtgccatctgtcacccctttctttgactaggaaagggaattccctgaccccttgcgcttcccgggtgaggcgatgcctcgccctgctttggctcacacagggtgcgctgtacccactgtcctgcacccactgtctggcactccccagtgagatgaacccagtacctcagctggaaatgcagaaatcacccgtcttctgcgtggctcaggcagggagctgtagactggagctgttcctattcggccatcttggctcccattttttttttttttttgagacgcagtctcactcctgtcgcccaggctggagtgcagtggtgcaatcttggctcactgcaacctctgcctcctgggttcaagctattctcctgcttcagcctcccgagtagctaggattacaggtgcccgtcaccacacctggctaatttttgtacttttagtggagatgggcttttgccacgttggcctgactggtctcaaactcctgacctcaggtggtccgcctgcattggcctcccaaagtgctgggattacaggtgtgagccgccgcgcccggcacttcctgtgctttcataagaacttgtactctcaccgcattatgattacaacagggcagatattctaatccccgtttttgcaggtgagaacccttgagggacagaactgatgagcaatatgcctcatgttggacaactactaagaagtgaaaactcagcaacaatgtgccatacaagcttttattacttttccctaagaaaaaattctagggataaaggaatttaaaatacgtggtgtaaattcagaaaaagacccataattagagcttaataaataaaagagattttttaacaccttaaatttataatcttattctggctaagaattccaatttccttttgccttgaggatataattgcttatatgccaaaggtataagtgaatattttgttgaggtcaacttttataattgtgttctctcaaaaaactggtgttatttgtctatctatggtttataatttctttaccgctatatgtcggtttactaagttgcaagatggttctgccactgcctgcttatacttagtactataatcattattattcctatttaactgatgcaaaaactcagctaaggtgtaaaattccctatgtttatataaccacactttccagttgataaatggatttttagaatgcaggtaaaggattatatagttagaaaaccagtattgtatcaccaccatacattactgaaggtgtcatgatgccctaccaaggatgaaatacaggttgaaagttagtaataattagcatccattcctgtattatcaacccattgcacacatatgtatccttcgatatgtagcctatatgtattgtcagcctcagtacgtactcactacattcccatgctgaattgccctctccttgaaaaaatacagaaatttaagtttgttgtggagattgtcacctgcttcttttttaaagatacacacactttgttctattttttatctaaattgcccccccacccccagttcctgaagcaagcatgtagaatattttccatgatcatatccaaagtggacctgctgcataggagagtcacattgcagttatgtgcacgtgaaaactgagataaattctcctgtctttggtgtgtttataaaatgtgctaagctttcttttaaccatgaataatttaggtatgaccctttctaagtgcaagagaatagatcaaatgctatcctagctctgtgatgatatagctattcccagcaactgaaagaaaagatcatcaaagcctcttacctttctacttactcactcacactgttagaaattatctcaaatgaaaattggccaaaggataagaattaatgtactaagactttgacagcaaatatcattaggagattgtacattccttctattttattgaacaatttctggctaggagatgtccctgaggtccttttctattggttgtattcttatattttcatgtgctgtccaagatgtttatcctgaggttaattttgtgtggataatgctaacagtccatttctgagttttagagctggctcattaatatctatgctgttcagtgtttcaacttgtgtaacaataaggctttcagtttttggatttgtactacagtacgcgtaactgcagttaaacaactggactctgttttttcttcattactctcatgatggtcattatgcagtttttgcatcaggctaaggagacaatctctggctttcattcaagataaagagcaaaatagtatcaaattcccttcaagacaaggaagagtgcctttggccgataatagttcatcatgacataaggaaaactatttcattaaaaatagaagagagaaaaaagggacaagtaggaggaaggctaggggagagatccaaaaaaagattcaattttattaatgcaaaatacccaaacttggagatcaagaaaaaaaaaaacattaaaacatcaaatatatgtttgggttttttttaattctttaaaaacacgaaaaattctgattgaggaaaaacattaaatgcatttttcaggtttatctgaagtcacagataacaatgttaatgaacagacccacatatgaataagtgaaaagacttaagaatgttttctttaaaatcaaactataactgagttcagaggcactctggattttagcaatttaaaagcaatcactgctactaatctaactatgaagaagctcgtaagatacctttaacatatggataataaaattgcaaaagtgccagacacgtgttcgagagatacacgctgagcagcatatacgtgtgcgaaaggcacaatatttcttttccatttgtatggccgtgtaactataattcaagccagcgaagatttatttatgtgacataaagactactagaataataaagagatttttaaattatgtgtatttgtgcaaatagactagaggtcaagaatacttcgatgacataaaaccaccttccctgagaaacgatgttcttgaatgagagtgcaggaattattgatgcagagttgcatagagatagtcagatttgggtggctcagcttctacaagaggaatggaaggtgtaaggtcaagtcccaaagtgttgtccagaactaggttaataatattgaacacctataccaaggaccaggcactttacgcagctacatatagaatctcatttaatccctgccataactctactgggtagatgctattatcaccctctataccaaattaaaagcaaacgtaggcataagtgtctaaagccactggacctgggctcaactcagtttgatttgatccccatatcacctgtaccttttcacagtgacatgcttacttctttataaagtctaggtcatgaatgcaggcaacctttctgaaggtttgacaatggacaaagtctgagaataaaaatagatgagtacaagtgatttggaggttagtacaatttgagaatttaatttatgaacagaattttttatacattatcaggtagccttcatcataatcaccgccagaaagaaaaatcttagaactaggagatagggtcttggtagcggcatgaacaaccttgatcgaatcaactgctttcctggttatgacttataaaaaaaggaattcaaccaaaagctacactgtaaataaactagggtgaggaatttgaagattatcttaacaatatccctaatggaagaagatgggaatgtggacaagaaacagttctctggtaggaaaaaaataatgtaattccttacatgatgaagtaaatacagtgtatgagaaaattcattcagccattcttcatgtaggaaaatccatctatgagaagaaatttaaaaataataaagagataaatagaaggaattggcccaagaggcccttagccaatatgtggatctatgtgtacatactgcttgaaagagggcaaacttcattatactttagatacacatatgctgcaactaaatcatcatggattataaatctctataaagtaaatttttaattaaaccaaggcaaatattgtttaaagctgctatcctatgttaatctcatattctacctgaaatgaattgtcatgaagaataaaatggaagcatagatagttgattatgcttcagaatataaggtaatattgttctttgcatattgtttccttttccttaccttgatttttattctgttctttactcctcctttcacattctttttaaattcataatacctacaattaaattgcaacccttggttctcaaggattctagctttcaaacaggtactcgtgcaactgagcgaacctgttgtaggcctagaaagagcaatgaactgagatgactataaagcagttctctctatgtcccctctttccactgccccagtggacacaggtaagcagctgacaaattctgccatgctttcaactggtcgtcagaagtcctctcgttagaataatattcttccttccatttattataactaaagctttactgataaggataagagctttcaaaaatgtacttttaatggggtgcggtggctcacgcctgtaatcccagcactttgggaggccgaggcaggcggatcacgaggtcaggagatcgagaccatcctggctaacatggtgaaacctcatctctactaaaaatacaaaaaattagccaggcatggtggcgggagcctgtagtcccagctacttgggaggctgaggcaggagaattgctgaacccgggaggcggatctggcagtgagccgagatcgcaccactgcactccagcctgggcgacagagcgagactccatctcgaaaaaaaaaaaaaagtactgccctgataatttgtgatcttaactatttaccaccaaatattacttaacaatgaaaacaataaataaaaataaaaaaaccaattaattcctcaaggtacctcagcagattggtaatgaaatcaaggactaaaaccttagtcttctgtatataaattcaaccctctttttagaatttaattgaaacactttgtgaacccgatcaaacatgtagtttgaacaaatctctatactttaatccagttttggtataaatgatgttttttatgtcataaagaggtgacttgttctgtcatttaaaaaatctattgagtattgtttgttttattccattttttctatattttattatattgtgaactcatccatacagacacattcagtgttgaaggtattgaaagagatgaggattctgccctcaaagaccttaacttctaagaaaagtttgcagtcttaatttgattctgctacttgtgttaggaaatagacaagtgtcatattgctatgaccttttcactgcttaaaacagatggaattgttcttttcaccgcaactttcaacaaagttgtatgtccccactctcaaccttgaaacacccttcttactgtgaatccccaaagatttctgagacagagataaaaaagcaaaattgtgtagaaggcaaatgagggagacactcagaaagaaacaaaaataactaaatcaattggagctcagcaatcttgcacagccaatacacacatgagtcgtggtacccatttattataagatagatgatttgtctttagtacattctgtgtggttatccctagcaccaaatgttttgctattcctattttactgaataagcactctttgcttagctttatttataagtctagtattttctgctcaacactttgtgaacaagtaatgtccctcattttcctgcacatgcctgatttgttccttataatgccaatgattagcatcataatccatgttcttttaagtgtatgttgaaatagatatgcctatattgtgcaccaaagaaaaagaaacaacacccaattagatcacagaaatgggttcaaaaatctttggttcataatgaattgataccacttcgtgatctaacatttaaaccttggaaagactaggttaaagtttaaaatggcaattaagagaagagagcaaaagagtgaaattgtagttttcttctatgagtgtagcaataatgagtaaaggattgaaggatttgttttaaaaaacctgttgccatttactaattgtgagtttgaaaactgtgccttattttaaactctatcttaaaataatttacttgcctgccataaaatgtctgacttatttacattttaactaaacatatcttagctgggaacttctgaaatcgctgtgaacaaggcaatgtgtcatacgtagattggaaagttatatcttttaaataaacaaaacatcttatgttgccttagcactgctgccagagtttataaaggtgaacaatcctgccttaaaagttaaggacactctggtgatcactccaagggtctgttgattgcactttttttatatccttgtaaggctttagatttcattggtccatctagaaaatgggattacctctgacataagagctcatattacatagcaattatgctttatccatagatattgtgcatttaattactgtacaactagccgaaattctttatatagttctccatttttaagtgtaactcaaagaaatatgctcaacataagcaaaattttcttcaagtaaaagaataaaaaacagttgttattgtcctataaatctaatcatggttttgttcattatacttcataaagtattttcaaatgccttatgccattaatgcttacaaaatgtctttgaggaaaatatggtagtattggccatcattatagacacagactgagtcctagtgtttcagttatttttgcctatgttggtagtaaagttgagattcaaccttggtatttttactcagcttagtattcaaaggtgaagttaatctttggtacctgttctctgtgaatcaaaatatttgcaataaatccacaagcttcaaaatgcagtatctttatgtaaactcaagtctttttaaggcctttccattttaaacttcatctattttccctgaagaaggtctacttcaacaagcattggctgtgtcctatgcatactagaaattatgctaggcatgattcgtgctagttctcaaatgttaaacaagctgtatcaggatcaactgggcaactgaaacaaacaaacaaacaaacaaacaaaaaacagcaattccaggcttacttctgaatgaagacatcagacttctaggttacagcatggggatatgggtagtaataaatttcaaatgatctgatcaagagccaaggttgcataaattaaaatacatttaaaaagaaaatataaaagaaaagagaaaatatctaggtggcaaacactgtggaaagacaaggcatattttgatttgaatcactgaaaatcacattaaatgagtgatttagaaaagaatggaggagagttgtgattcattaatttctatggcacagtttatttacggtgtttctttatttataatacatctcataatccacataatagaaaacttactcccaaaaagatttactaaactttggaaatatggagtacatgacataatggatcttaagtgcttagaccacagaaggcatttatattagtttgctaggaccaccataactaaatatctctgactggatatcttttttttttttttttttttttttttttgagacggagtctcgctctgtcgcccaggccggactgcggactgcagtggcgcaatctcggctcactgcaagctccgcttcccgggttcacgccattctcctgcctcagcctcccgagtagctgggactacaggcgcccgccaccgcgcccggctaattttttgtatttttagtagagacggggtttcaccttgttagccaggatggtctcgatctcctgacctcatgatccacccgcctcggcctgactggatatcttaaacaatggaaattaattttctcacagcgctgaaggctagaagtcaaagatcaatgtgccagcaggattggttatttctgagggctctccttgggttgcagacgaccgccctctttgcgcctcttcatatggtagtcccactgtaactgtgcacctctagagtcttttgtgtgtgcaaatttcctcttctttaatgggcaccagtcagattgaattagggcccacctttgtggtttcattttaacttagttacctttttaaaggacctatctccaaatatagtcacaatctaagcaactgggtgttagggattcaacatataaattttggagaacataattcagcccctaacagcttttaataaattttagttgctctgtgttttgtctgattctctacttacttctttatgtcacttacaggattccacacaacccctgtatctgctcagtttcatttgttgctgaaaggttatttgctgtaggaaatctgataacttgaaagcttgttattggagatgatttgtgtatttggggcttctagataaacattcacataaagaggaaggcgggagagtttggtgtttttaccttgaagagtgagtaggctgggaatttctcacaggttgcccaactaacaatggagatcctttcagggttggatgtttaaatggtctgtaaatctatcacatgcacaacttcctattggaactatatctaggtatggacctagatattctatgtgattgtttcagagtctgattttttactttttctgtattctagaaaattaactaataaatattttaagctgacattttaaaattgtaccttcttttccctgtggaaagaacattcatgctttattatttatgtgtctttctttccttctagctttcaagtttttcaaacatatatatctatgcttctttctgctgtcaactttagtgataaaaaagaatttttctcactgcttgtttaaattttcttcagtgagaattccaccacagaaacaaacaaacaaaacaattcaggaaatactaatgcagttttttttttaagtttaacattatgtatggttgtacatttcctgttaaattattatcaacttttcataactggttctgcccttcagcccttggaagccatttgcaagacatttctaaaacactatggaagaaatccagtaaagatagacttgtctaccaacttgacagtcattctttagaaatgcctttgggagagtatcatccattttcttcatttttccccattgagaaatgagctaaactaatttctactgcaatgttaactcatactttcatttcattcagggaacttttcaattacagttttacaaaggaaaatacaattttacgaaggaaaattgtaattttaccttcaggtttattatcaagaattaacagaaattttaatagccagcacagttctttcccattacttaacttgtgagtatgaaaggtaaaatttctaccagattttcagttgctcttgttttggtccaatatgttggtatttgcagggatgaagaaccaggaggccagctggttacagataagttccatattgactgggattccgtactcattgacatggataatgtcattgtagcaagatttgatggcagaggaagtggattccagggtctgaaaattttgcaggagattcatcgaagattaggttcagtagaagtaaaggaccaaataacagctgtgaagtaagtggatgcacatttttcttctctgttttctataatgacagagtcttggtatatgacatataatattactaaccctgactcaaggcttctattttagtgattgagcaattttgtaagttaatcataaagcctatttcattttttttttgaagtacctgtcacccttagtgctataataaaagaattctcatatttcccctctggaattaaaatttactttggatttatggaagttggatacattttaattataccactatattatttgtttacaggaatccacaatgtctgttgtatcctcagttaatcacaattcttgaagtttcacagataccattatcacactggcatgaatgtgtgacctaagaaagttagtgggttctttataatagcacacagaaaccagatatgatattgttcaaatgtagatgttgattcagtaggcctggaatggggcccaggcttctgcatttataacaagctttcaggtgataccaaactactaggccatcactttgagtagcaagattttggagtatatgaccctaatacatgaacagagctacagttagtaaagcatttctagtcattagctattgttttgtatgtatgcatgccaactatatatttatatttgcatttaactcacaaagatataactattgtttttcgttttcattgcagatttttgctgaaactgccttacattgactccaaaagattaagcatttttggaaaggtaaatagtagaaatgctgaatctatctttttatgcgtatctatgttatgtaatatcctattacacattcacaggaggccagttggttacagataagttccatattgactgggattccatacttattaacatggaaaacctcactgtagcaagatttgatggcagaggaagtggattccagagtctgaaatgtatatatataatatatgtatatatacatacatatatgtattatttgtatgtatacatatgtaattacatgcttcattatattataattcctctgtattatcctttaaaaaataacataattagtattatatacagtcagtcatttattaattcagtaactatttattgggcagttagttggcacctggtgtcagaagtagaacaacaacaggacaaaatggggctttgttttcatgaagcttgtgttccagagaggggaaacagtaaagaggtaaatgaaaaacacaatttcatatagtaataagcctcataaagaaaacaaagaaaaactgatacataaaagctaactgcagaagcgcggccagtgtcattagattgagtggtcaatttaggactctctgatgaggttatatttaaacctatacctaaataacaaatggacgctggtcaaataaatctcttgaagcagaatattctccacagaaaaaaactagcaagtatcgcaatcttaggaaaacagacacaggcttagaaactaggaaatgaccagtgtgcataattacgtcatctgtgctctctgcacgatatttacttattgcagtaactgttatgtcaggttcaacattattttgacagtgggaaaatagacctcatatagatatttattagtttgttttttatttttgttttttgttttgttttttttttttttttgagacggagtctcactctgttgccaggctggagtgcagtggcgcgatctgggctcactgcaacctccacctcccaggttcaagcgattctcctgcatcagcctcctgagtagctggggactacaagcacgtgtcaccacgcccagctaatttttgtatttttagtagagacggggtttcaccatgttggccagatggtctcgatctcttgacctcgtgatccgcctgccttggcctcccaaagtgctgggattacaggtgtgagccaccgtgcccagcctattgagcttgtttttaacacatcagtggacaatgtattataaaggtaaaaaggccaggcgcggtggctcacgcctgtaatcccagcactttgggaggccaaggcgggaggatcatgaggtcaggagatagaggccatcttggctaacacggtgaaaccccgtctctactaaaactactaaaaattacccgggcgtggtggcgggcgcctgtagtcccagctactcgggaagctgaggcaggagaatggctgatcccgggaggcagagtttgaagtgagccgagatcgagccaccgcactccagcctgggcgacagagcgagactccgtctcaaaataaaataaaataaaaagatgaaaggaaaagggggaccttgaactattttagtttacaaataaagcaaattcttggtgttcatggatttaaacatatgatattttctactattcataagtaacctagagatccatgacataaaataactggtaagtttaattggggcgtaaattttagtggtacatactgacaggtgggtgtataaaaaaccacttaagaaatgagtaaaatacaaatcagtgcaaatcacgaccatcctctctccacttcaaacatctgcagtgtatcatgcctttgcagcattctacacttgttgtcagcaatattcaacagataagtaaaaatattttgtgagcattgctcctccaacataacacaaagaagtaaataactgaaagtgcatccctagtagtaaaggttagttttttgtttttttttttaaaggaaaacatctaagaaagtgatcatcccaaagaaatggaaaccctagatatattaaaaagtgaaatgaaatcctgtctcagactgcagcactgttaagccttagggacattgtgctaggtgaagatagccagtcacagaaggacaaatactgtataattctacttattacatgaggtgtctagagtggttgagttcatgaaaaaaaagagtgaaatggttgttgccaggatttgaggggagaggaaaaagggaagctggtttttaatggatatataataatggcaagaatgtaaactagtaaagtaaaaaacaaagataaatagagaacaaccaagccagaaaatacagttcattgaaaaaaaagagagggatggaggggtgacaaaaagggagagcaagagcagtaaaggaagaatgtgagtgcaaatgagagcaaggtgctctttagtgattagccattttatgagcccatcagtttcttattagggttcttggaatttttgtctagtttcatatttgcaagatgaaaaagttctggaaatctgtttcacagaaacaaatatatacctgacactacgaaactgtgtgtttaaaagtagttaatagagtaaattttatatgttttaccacatacaaaaaagtacatgcagtagggaatattttactccttaaaagtcctgatacatgtaataatttacaaatggcttagggcctatgtatttcaatgctctgcttactgtacacataaataagcataaaggaccaaataagcttttacaaacattcgtggaaatttagagaagattcaaagggttgtaaaatgcctcatggaaaagggcaacatgagctgagtggtgatcagcaggtagaggggaaggaaaagagtctcatgcaaatgcacagtgtcagtgaagggagcatgtgtggagaacatgaaatgaagtagttgactgttattagaagaatgataggcaataagaatgagaggaagactgggccgagacgatagaggatcttcattgccactgagaaattagaagctcagcatataaaccatggaaaaataacactctaggcttcacatttagaagttcaaattctttttccccaaatcgtcattgtatacttgatgtgcctcagagcaaatgactctggaaaactaaaagagtgacataggatacaaacaagtaaaaatatgaatgacttcatcttaaatggaaaaaatattccaggtcaaacaaatatgcatatctgtgactgagttataaattaaaagttgactttctcaccatgtaaaatacactgtttatcctaagattccgtagaccttgcgattcttttttcttgaaatgcactgatttcagattcaaattaggttatgctaacctcataaaacgggttggaaaacaatgttcttgctatactgattccctggaaaaatttgtttaaaattggaactagactataaagaaatttggagctattgctttctgtgtgggattaaacatttaattagtttttaaatttatgtaaccaatagaagactattaagattttgtttaatttcttctgaggtcacctttagtactttgaaaagaatattttttcacttcatataacttttcaagaatatatacaaacagcaatatataatatcctcttattatatgcttaatcatttcacttgtggcagtaatatcccattttgatttctattatgacttactagtgccttcttgcttttgctagggcactctcttgctctcatttgcactcatgttcttcctttattgctcttgctctccctttttgtctctcctccatccctcttttttttgttcagtgaactgtattttctggctggttgttctctatttatctttgattttactttgctagtttaccttcttgccattattatttttcttctactttttatatacattttttcatcaattattaagttgaatgtctagcttattaatttttcattctttctttcaaatacaagcacttaggctgggtttggtggctcacacctgtaatcccagcaccttgggaggccgaggtgggcggatcgcctgaggttgggagttcgagaccatcctgaccaacatggagaaacccctgtctctactaaaaatacaaaactagccgggcatggtggcacatgcctgtaatcccagctacctgggaggctgaggcaggagaatcgcttgaacccaggaggcggagattgtggtgagccgagatcggaccattgcactccagcctgggcaacaagagcgaaactctgtctcaaaacaaaacaaaaaacaaatataagcatttaaattaaaaatccttttgagatgctctctgaggtatttttcactgctacagagtacttttattaccatatagtgaaaatatctatttgtcaggataagtctatgtcttctgaacttttcttattatttttatgtcaaattgaatgaaataattttttggtacttttctgtaacttactgactataattgaactgtggccaaagaattgatcaggataacaaaaatactttggaatatcaattgatttatgagttagggagggaatcattgttttatctttatcaattatttaattttgtgtaattaattttcttattttacttgatcctgattagccattttatgagcctatcagtttcttattagagttcttggaatttttgtttagtgaattgatttttttttcttttttttttttatttcaacagaggtttgaggactaggtggtgtttacttacatgaataagttctttagtggtgatttctgagatttaggtgcacccatcagcagagaagtgtattgtacccagtgtgtagtctttcatcccttacccacctctcactttttccctccaagtccccaaagtccattgcatcattcttgtgcctttgcatcctcatagcttagcttccacttatgagtgagaatatattatgtttggttttccattcctgagttactccacttagaataatggtctccaattccatccaggttgatgtgaatgccattgtttcattcctttttatggctgagtagtattccatggtgtatgtgtgtgtgtgtgtgtgtgtgtgtgtgtgtgtgtgtatctcacaatttctttatccacttgttgattgatgggcatgtgggctgcttccatattttttgcaattatgaattttactgctataaacatgcatatgcaagtatctttttcatataatgacttcttttcctctgggtagatacccaatagtgggattgctagatcaaatggtagttctacttttagttctttaaggaatctccacactgttttccgtagtggttgtactagtttacatttttaaaacttccatgtgtgcctaaaagtgttagtgttacatatatgtccatttaatcaaacatatccattttgatgttcaaataataaacattgattttcactatgtcctcaggaaggtgcattaaagtatccctttataatgtgaactcatcaatttctccttattaatttttctaagtacattttaaggctattattattcagttcctgcaactacagaattattatatcttctggataaatttaatcttttgttgtttttattggccaagtttatctctattaattttttgcattaaagatttttatattcaaattacaataacatccttttttcattgatacatgtttattatcagcctttccaccttattattttcagcactttccgattgatttaggtatgccctttaaacaaaaagagagagagagaaatatgtttttatctttttgccaatttctgtatttttgttgaagattgtattcatttaaatttcttctaattactgataaatttaaatgttactgttttcattatatgtgccattatctgtcctattatatttcttgtgtcttccatttatttgaattgattatttttttctctttcattcttttttctaaatataattttggtttgttcaattatattgctgagaagtattgtattgtatgactataaaataatttgtttatccattcacctacggatgaacatttgcattgtttttagttttgtgtatagttattataaacgtgtacgcttgtttttgtgtaaacatatattttcatatttatttgtaaatacataagagtagaattgttaagtcacatagtaattccatgtttacctgtataaggaatttccatactcttttgaaagtattcatactttgtattttatgttttaggaaccatataggagagtttcatttgttctacatttacgccaacacttaatatcatcagtcttttaaaatcatccacaactgatgaatagtgggatttattttattttcgtttgtagtttactgataactgataatactggacaccttttcatgtgtttattgcttcatataggtatattttaacataactgatttgttgaccattcagactgtgcaacttacactttcatattaaaatttactaagtcacagaaagcatgttacaactgcaaacctattccttccttccccttttcatcatttttaattgagatataattgacataccatgaaattcatccttatatcatatcttaacatcagatagtagtgtcttaaaatcaaatagtagtagttcttccatcttgttcttctttttcaaagttcttttaactcatctagatgtattacatttctttataaattttagaatcactttgtatcttttctaaaaagaaaatacaccatagggatttcttatgtgaattgtatcaaatctataaatcacctggcaaagaaataactgacatctaagcaatattgaagctttcatatttttaaaagataattttgtttggtgttctgttttttctagtatgtgcatagttatagatattttttcattaaccatgtttaggttgtattgggttttctgaatctatgctttggtgctttctgtcaattctagaaaattatcaattttctattagaatattgtcataacttctcatcctccttaaacacttattaaaaatgtgttaaaatctcactttaacatggttattttataaacttttcttggtgccttttggtatttaattctgtgtcatacttgcttctatagtccaataattctctcttcatgtgtgactaatggttttctatattcattgcttaaatttaaaaaaattgttactagaagtttcactgagctttctataaaaatgtttagctatattttaactcttgctttgctgatgtgtatttttaaaaatatatttagcatcattatctgatattttacatcttattaaacaaatatcttttatttttgagtattggtttcttttgcctgttatttctgctgtctctcagtcatggtgatacttttccttgtgtactgtttatttacttgtagatgagtttatctttcttggaattttatctatggggattctttgatgcttttgttgcatttgtatttatgtattatgttttatttttaattgtgtatgctgaattgggaccacacaaaccaagtgtggacttatggctcaaatttttagtcaatattaattattttttattagctcagtacaagctcataacaggaataaaaattaaaacatctcaccaatctcttttatgcagcatgggcttttattttttgtcacatttagacaatgcttttgggatctagatttatttagggtctcctttagacccattgtggattttgtttacgccatccaccaaagaaggcattagaacgaaaggtcaaacaaagtctttagcatgtgaataaaacattggtttcatgctttatttttcacgtttccagctttcagtttgtatttggcttttgtggatttatgagatttatttttagtgtttggggttgtgcctttttctaaagccaccaacttatatttgtgttttatttatttgtttggttggttggttttactttggttttctttagttgagggatcaagtggagtatctgtttcacttaatgctggaaaagaaactgccataaatatgttgttctcatcaatgaggctgaaacaagtcttccttgtaagattctaggctaagttaaatctcaatgtaaaaagcgatgtgattcatttgagatatttcctcaaggaaagaaaagatgattggcagctctagttctaggaatttgcaatttctagtcaacttcttttctttacactcactaatatttgaatgaatttccaggttctgctttttctccttttggtctaagatttaccatgtttttatgatgatatatatctatatctagctagctaaataatttcattcattattatggactttgccagcaaaaactaaacttacactctgagatacatcatactgatatatatacacctccataaagccaaaattatgaaatttaaaaaaatgctcaatgtttttgtcgtgtgtataattgtttagtttaattttttgcttttgagtatggaaatgtttaataaggagctgggatttggcgatggctgtgaggcacgttctttttttatttttaatttttttaaaattttacgttaagtaccacggtacacgtgcagaatgtgcaggtttgttacgtgggtatacatgtgccatggtggtttgctgcacttatcaacccgtcatctaggttttaagccctgcatgcattaggtatttgtcctaatgatctcctttcccttgcgccccaccccccaacaggcaccagtgtgtgattttcccctccctgtgtccatgtgttctcattgttcagctcccacttatgagtgagaacatgcagtgtttggttttctgttcttgtgttagtttgctgagaatgatggcttccagcttcatcaatgtccctgccaagaacatgatctcattcttttttatggccacttcgtattccatggtgtgtatatgctacattttcgttatccagtctatcattgatgggcatttgggttggttccaaatctttctaatccattctaatcagtgttctttaactatgtaaagtgattaaggaatagaatgatagtatttctaagaatagtctttggtcacataatatatattttttagacaatactactacctcttttctatgtattaaaatgttagtcctataaacaccaggaaagcattgattaaattaattaccttctaaacctattacatggatactagaggaaaagagaagagaaacttcagtcagtacaaaagcatagatgtcaacttttgtctttttacatccaattttatttcaatatttcacaagtattcactaaattctaaaagttgcaactattacgtaaaatgggacctaatgatatttcaactgcatttactgttatttactttccaactgcattttctgcaatatagtttaactgaaatctctttgattataagcatgcattccacctttctacctcagtgtctttgttcatgccttttaacttttttctaacagcctctaagcctacatattgctttagaattctatctcttattaagccctattcaggtgtcgtttcctccattaaccattcactcaatctctcccactggaaaacactattccctcctgtgtactcatagaacactttttagtagcttcttgtaatcattataccagtatgtaatgtattacattcatttgtgttctgttttcatttctaagtcagactgtatgctttgtcaagttagttcagttttatttgatttttttgttgcagagacatttgaattgaacttatttcataatctttctttaatttggaattccctctccctctggatatccaaactttatccttttttcaaactccaattcaaacctttcctattctgaaagtctttacctcaatttcacacatagaatgttctataaatatcaatgaagccaaggtgattgaatgtattattcaagctttttatttctttactgattatctgtctactttttctatcaactaatgagagagggtgttgaaatgtttggctatgccataagacaaaattacaacatcttagtctaaaaatcttaattgctttatttgcaattctagaattgggcaagacttcattccatcaaatagaaaaagtgtcccaatgagctgggcagaagaggctggttttatagatagaaaagaactaaagaaagaagtaacaaaaaataaaaagcagattggtcatttcaaagttactttgtaaagcaggaacagttgaaaaataactggtagcatcaggtcacttgaggttacattttgttgtcagaattaaagcagaggaaacatcattatcatgctgattgaaactggcctgtttgggaaattaggctgttaacctcttactcctgctttctaggaaggtcaagtaacaactcagtttgggtttggtgacatggaaactcagcatgagtggctccattttgatttttagtctggtccgttgaggcctagtgcagtagcttagttcaaaacaatgacttcctacaatttttatttaaaggctataattgtctgtttgccttttcctactttcagttctatcagttttggcttcatttatttccatacttttttattgtatagatacatacatgcttaggatcattatttcctcttgattagttgacctctttattgttaagaaatgaccttggccgggcatggtggctcacgctgtaatcccagcactttgggaggcctaggtggctggatcacctgaggtcaggagttcgagaccagcctggccaacgtggtaaaacaccgtctctactaaaaatacaaaaattagccgggcatgatggtaagcacctgtaatcccagctacttggaaggatgaggcaggagaattgcttgaacctgggaggcagaggttacagtgaacaaagatcatgccactgcattccagcctgggcgactttatttttggttatattatctcctttgaaatcttttttgtcagatattaatatagccactccatctttctttggattattgtaaacatgttataaatcttactccattgtttttctttttatctatttgtgtatttacatttacgtattacgtatttatatttaaagtatgtttcttataggctgcaaagagttgggtcttgcttttttattcaatctgacagactctgcatattaaatctctagattttaaataatgtatttagctctttcacctttaatgtaatcattgttattgttgcattaaggtctatcatcttgccatacactttccatttcttctgcttttagtttctttaaaattttgtctagtgtgctttatattaaaagagcattttttataataaaatttgctttgttatttgttaattataactggtctttgcattattttgatggttcctttatggcttataatgtatatttttaactaattaaagttgtcctcctgtgatattattttacttcactcttcaaggtaataagctgtaaacaggtcagtatttatgtatgtatacacatacatatatacacatacatatatatacacatgtacatgtatatgtatatgtatatgtatatatatgtacatatatatgaagtgggatatatcagaggagggcaactgtgtgtgtgtgtgtatgtgtgtgtgtatatatatatatatatatatatatatatatatgctctacagtggtatacttctgtttctctatttctgacctttatgccacagttgtcatacattttatgctacatgttataaatcccaaaatatattgttataatttttgcatttaaaagtcagttatttttatttttatttttattttattttattttatttttttgagacagagttttgctctgttgcccaggctggagtgcaatggtgtgatctcggctcactgcaatctccacctcccgagttcaagcgattctcctgcctcagcctccccagtagctgggattacaggtgtgggccaccatgcccagctaatttttctattattagtagagatgggggtttcaccgttatggccaggctggtctcaaactcctgacctcaggtgatccacaagcgtcggcctcccaaagtgctgggattacaggcatgagccactgcacccggcctaaaagtgagttatttttaaacaaatttaaatatagtgtttaaatgtttatatatttacccaggtgactaccaattccagtgttcatcatttctttgtgtagatacagatttccacctagtctcactttttcttctgcttgaagaacatcctttaaattaccttgtactccaggtgtgcaagtagtatattcttccagctctaatgtgtctttattgcactttaatcttttaaatattttattattttctgggcaaaaagttttaggttgacatttcttattctatactgtaaagatgtttactaccttctggtttgcatttttttcaataagaatatgccatcattcttaacttttttcctctgtatacaacgcatcttttctctgtagatgcttttaataatttctctttatgattaattttaatgaatttcattgtgatatgccttggtatagttttcttcatatgtcttacgcttcagtttattgaatttcttgactatctaggttaagtgtttttaacaaatttggaaattttttattattatttcaaatattttttgttgtccactttctcagggattataaatatgggtagattgggctacttgaagttgtccccaaactcactaatatgctgttcaattttttttttaaaagcatgcatttctttgtatgttccatttcagatagttctgctatgcctcaacttcattcttcaaggtagcaagctgtaacaatgctaggactgacgtgtttatttttcatcattcagggatcaatgtccttcatcagtcaatgtccaatgtcctaaaaacttctattttatatattttgtctatatttttagtcatttcatgtgggaggataaatctcatttctgctgcttcatcacgttagaattgtaaacttttaaataaaataaattgtatatttattaaccattttatatgtctctttttggattgtccatttatccattatatatgcttagtttattttgacttctggtatatatgaacatatatatttgtttccttgttgacatactaaaattttgctatattaaagatagcagtctctgttcacacttgtttgaaatatttcctcagctgcttgaattttgttaaaatttgcatatgatgaggcaaaaaactgaagttctaaaacttggcaaactcttctcaaatgctttcttgggtaatttcttccagtgattttattatttagatgtcctgtttctatcaaaaggctaaatgagtatttattatgttttctctttatttatctgagtttaatagagatgagagagatgcatagcacttgtgaggtatggtgagaatttacttatatagtttcaaatagctagccagtttcctagctccgttggttgactaaatcaacatcattaacagtgataccaactaagaattaagttctcattcatttcagggtttatttctgttgaattctgtctttctgttcttatgctaatcttacagtcttttaattataacatgcttcattataactcattttaatatttttaaaagaattttcactctttacttctctctttgaaaatattcttggctcacctgttctattatctttgtttttttcaaattctcccaaaatatgcaactggaattttttaattaaaatttgtttcaacagttataataatttaagaagaattaaaatagtcacaagatgtagctttcatctgagtcagacaatatgcacagtacatttcttttatttctttttttatatatcctagtagaattttatagctttcttaaaatatgccaaatctctctcctgctgcttttatttctaactattgcttattatttgtgtgttttaatttttattgtaaattgtgtcattttctcagtgttattttctaactagcttgttgggataatggaaaggttatgataatagcatatgtagcttttagctggccactgtttattacttattaattatggatatgacttgattgaagacattaagcaactttagtttgaataattatcctcaggacctaacctcatttaatatataataattttaattttttttaagaattatgtgtaagtgctaaatataaaacaaaactcctagaagcaaaattttatggacatagcttctttaaaaacattaatcacagccgggagcagtggctcatgcgtgtaatcccagcactttgggaggccaaggtgggtggatcacctgaggtcaggagttcgagaacagcctggccaacatggtgaaaccccgtctctgctaaaaaagtacaaaaattggctgggtgtggtggcgagtgtctgtaatcccagctactcaggaggctgaagcaggagaatcgcttgaacccagtaggtggagtttgcagtgagcccaattcccaccactgcactccagcctgggcaacaagagaaaaattctgtctcaaaaaaaaaaaaaaaaaaaattatcacaagaactgaaattaagtttagttgtcttataaacatttttttttagaacagatatcactgtgattaccaggccaaaaaaagattaattcatccaacaaacattattgaatgtacactatgtgcccagcactttttttgaagtgttggaaatacagtggtcaaagagtagaagaaaagtctttctttactgaatttagttcagtaaggagagctatatggaaaacatgtaaactaaacataattggtgaaatacataaaatgtcagatggtgagagtttgattccaaaaagtaaagaagagaaataaataaggatgccaggattagagtgaatgtggccaatttagattggaggtaaggaaaggtatcactaggagatcatgtttgaactaagagaaggcaatgtaaggagataagaactatggatatctggggaaaataaaacaaacttaaaaatgtaaatgaatatgaaagcttcttaaaactttacttagggaggtaattatttgttatgtaaagttttgtatcttttcaattgagggagggcctctcagtgtttgagtccagcttgagtcacttctaaggtttaaagcttcagtatacattatctgcagaattaagatcctgcctccttgaggcaggattaagattctgcttcaaggcaggattataggtattgtgataaaatgtgagtgattatgttaagcgaattaatagttttaatgcaaaataatagagtgtaataaaatttatcttgtatttataaaattctttatttccaattaattcattgtgtaccacaagtgaaatggttcagaaagaattacacaagtttaaattcgcacaaatcacttctttctttctttctttctttctttattttgagacggagtcttactcagtcgcccaggctggagtgcagtggcgcgatttcagctcactgcaacctctgcctcctgggttcaagcaattctcctgcctcagcctcctgagtagctgggattagccaccacacctgactaatttttgtatttttagtagagatagggtttcaccatgctggtcaggctggtctccaactccttaccttgtgatccgctggcctcggcctcccaaagtgctgggattacaggcttgagccaccatgtccggcccaaataacctcttttaaaatcccagtctgtcagtgtatcccttttactatattcataaagtcatttaaagatgatctgaaaacctggggccacagcaaacataaattttgagtaaatggcattgcagatcccacctctgcttctccaagtccttctatctattgaatttagtttcctacatcatgagtatatttcttttaagaaggaaaattctaaggaaacattcctatattttaggcttactaaattaaatttaaaaataacataaacttgttaaacttttgtaagtaatgctaaaatgcttggcaaatgggaatgacaaaacaattttaatgaatagcaaaatccgatcacgggaagaccaataaaatgcacaatgaaaacagagcagcctacactgatgatggaagtttttgatctttattaaatcaaaagtagcctctaatttactacagacgatatggtgattcccattttttaatctacctgatgatatgcattgttttgaaagttgaaagcgttcttatatctacctagaacttatatcttatttttgccctcctctgaagtaaattttccaaaaactcttttgtgatatactattgcattctgtaaatacatataaaacaggtgagaggaaggcgagccattaaaatttaacttattttcatctggggctggtggggcacacctgtaatcccagttctttgggaggccaaggcgagtggatcacttgagcctaggagttcaagaccagcctgggcagccatggcaaaacctatctgtacaaataaatacaaaaattagctgggcatggtggcacgcacctgtggtcccagctactcaggaggctgaagtgggaggtctgcttaagcctgggaggcagcggttgcgatgagcagagattgtgccatgtacttcagcctgggtgacagagtgagaccatgtctaaaataaataaaattattctaatttttgccagtgtcgatttttgtttaaaaatcaattaaagaagcatttgtggttcaattttaaatgctataaatagaattttattcaacagcttttattatcataaagacttagaaaatatttggcttcattaaatgccaaattttcatatttacaaaaatagtaaaatataactccttgtatagcagcaataatttacattcctggttttactgaagaatcacatggggagatccatcaggtgcccattctccacagattgtgattgaatgtgggtcggggagagcactggcactttttttttttaaagcttcactcatctagggaacatcggctgggactaagaagatgtttccggtaggcacctttattatacaattatgcagtaataacttgttgtatataatgtagatcagcagcatagaggtcccctgagagtttattaaaaatgcacaatcttaggtcccaccccaggtctactgaatttgaatctgtatgctgacaacactctcaagtgatttgaattaagttagaagttaagaagcattgttgtgggatctacccctcctttggaaggcactattcctgattcctagagataatcaggctatgagagacatgtgaaactgagataaataaaataaaacaaaccaacaaaaacatataatgtcatcttatatatattatttaaatgtaacataagcttttatggactggaatattcattattctatcaatgttttcaggttatataaacaaacatcataatcagctgaaagtttgcttggccatcatggtattgttaatagaaccagaaaagttgcatgcatcagctaagatgtgtgatgcattcctcactatgggaagagtcttgcctacgggaaatacttgaaatctcttggctgcaacacccttcgcccatctttatgacagagaactaggaacaatatactggaaatgctccctctagggacaacactttcaagagctgtttccacttttgctttatgatacaggttcaacgtacctaatctgaaaatccgaaatttgaaatgctccaaatccaaaatgttttgagcaccgacatcataatgccacgcatggaaaattctacacctgaccctatgtgatgggtcacagtcaaaaatgccattaaaactgtttcatgaacaaaattactaaaaatattctatacaattactgtcaggctgtgtgtataaggtatattaaagcatatatgaatttcatgtttagacttaagttttcatccctgagataacacattatgtgtaggtaaatatccctaaattttaaaagaatccaaaaatcggaaacttctgaccccaagcatttcagataagggatattcagcctttagctatttactttcttgctttgcatagcttaccccaccttcttatttttctttcttaggtaggttaatacatttacctacctaagggaaaatttaaaatgggctacttccagattttgctggcctaagactgtctctctcaatgagaatgagcaaaggcactttgaagtagcttatatctatataggataattttctttccttcagttactaatcgttaaagctttgctcaagcttctgagtactatctaaatattccagtaccagaacaatatatgctatctcagtccattcagtaatgaatgactgcattttgaacttttatgtaccaatttttaaatgatgctccaaatacacataaatgaaattctttatttcttacttcaagagtttagtgacaatgacaataaaactataacctggaccacacttgagtcatctgaaaatctttcaaaagtagacttcatcatgaacaaactgcatcagaatttctgagattgaggcctgaatgttaatattttttaatacctcccaagatgttctgatttccagtagcataaagaacattactgagagtagggctgaaaattaatttctaaaacagatagctcagtaggtcatttttttttttcagcattactgtaattattaaaatctcctctggaacttttctagtcagatcttggtctacaaaagaaaactggacatcttggcttattaaaaaacatttcaagagggtattcaaaattaaacttaaacaataatttaactcatctatctgggaacattattcattatatcccattgctttccaaaacttagttgtgtggaatatagagaagacaattttctcctttactcttcatgagtttttagctaagattccctgcaacaaaaggcagattaacaggagaaaaacaagccgggcgcggtggctcacgcctgtaatcccagcactttgggaggccgaggcgggtagatcacgaggtcaggagatcgagaccatcctggctaacacggtgaaacccgtctctactaaaaatacaaaaaaaattagccgggctggtggcgggcgcctgtggtcccagctgctcgggaggctgaggcaggagaatggcgtgaacccggggggcggagcttgcagtgagcccagggggcggagtttgcagtgaacccagggggcggagcttgaagtgagccgagatcgcaccactgcactccagcctggaccacagagcaagactctgtctaaaaaaaaaaaagcaagagaaaaacaaacagaagcttaataacataaatacctcctttgtacatgggatagaaacaagaaaaatgggcagatctctagagtagatctcaaagaattgtcttatacctcagatgcaaacactaccattctctgaaacaaaggcataaggatgtaggaaaggttttgttaagaaagatgaccaggaaaagcaaaacacaagcaaagtttgtcacgcatagtgaagtcgatttcttctccattgattgagtcttcggttatgtagttattcttctcttcctggtgcggaaagagagggagagaaagagagagagagagacccttgaaaacatctatacatttcctttatagacataaatttatcttacacaagggaaacttccagccttgtttctagtattcttcctgtgtctgcagtttctcaaaatatctagctccaaataatcctaagccagagaggcatatttagggtgaaatagtctgagtgcagccttattttggggtgacatgttctgaactctataagaaattaaaacaatctaaatttttggtgagatattttcaaaatttcattatttcttaattctacataatcatcattatttcagtattttattaaattagtggaaaattacatgtgatttaataagtgctttatttccctaacctcaaattatttggggcaatttccagatgtatagtatgaaatcatggagcaatatttgacatttggtgatgtaattaattttatattttacttaaggcttattaaaacagctgttatataacaatttaaacaaatgttcaaaaatcttaattgtacaaaatgattttggcttttttcccccaagcctgagacattctgatatgatgtacagtaccaaacattgatcaaaagctaaaaatgtctccaggcatagttgttatatataaatttgtgtgtgtgtatgtgtgtgtgtgtgtgtgagatatatatatatatatatatatatttttcccccccagggttatggtggctatattgcatcaatgatcttaaaatcagatgaaaagctttttaaatgtggatccgtggttgcacctatcacagacttgaaattgtatggtgagtactttctacagactgacctagtataatgtattgatttgtagaaaacgaaagcccaatttagaatagctcaattgagctcatttatcatatgttattagagcctgttttcagctgtttatctcctccttgattcagctgattttactaaagcatgacaattaaatgtaaaatgaagaaattaatgaaatatgccagtcaaatagtttttagtttcttctcgaatgtctgttttcttgggtcacagcctcagctttctctgaaagataccttgggatgccatctaaggaagaaagcacttaccaggtaactaatttgaaaataacaaagaaagaggagtatttttgttctaaaaaattagttaaatggcttatttagatctatagatacagatatttgtattttcctttataggcagccagtgtgctacataatgttcatggcttgaaagaagaaaatatattaataattcatggaactgctgacagtaagtattatacttgccgctgctgtttgatagggtatgaccttttacaaagggatacatctaaggacttgcttacaggaagccctgtaaaccttctgaagaagggagcagagagtcacacaaagaatcagatacatgatagaaggtgggaaaaaagaattcagagataagaggagaggaggctattcctcaaatggcagcgttgtccaatcaaactccctgtaatgatggaaatactttatcaatgttgctgaaaaagtagccactggccacttgtggccataccttgtttagtgtgactgaggaactgaattgattttatttaattttaatttaaaaaggcacttgtgtctagtgactatggttacagtgttattcagcacacctaaaatggaaaccaacctggaaaacagaaaccaaaaagctgcaagcactgacatgaaattctaatgaggttacccgcttaaatgaacttaaaaactttaaaaaggcactttcatatcatctctcattttttcatcactttaaaccttggaggtggatgtgattgatgttagtagtaataaataatatcattttatatttacatgacactcttagggaccaaagaatctatattttattatcctctgtgatattttacaacagacagctgaatatttatagcttcattcatggatgagaaaaatcaatttcaaaaaggaaacagatttatccaaggccatctggcaagtgagacaagaaagtcaaagtcttgaatcaatatttcctaaatcttgaacttaacttcttcctctttagggtgggttccactgaatgatttgcttcaagggtactatatggaaaaagagagaaagaggaactttacagtggagaaatttgacaaacatcacatcaacagtgacaagtcatgttattactgttattaaatgcccttgatatgatgtagtggggatggcactttacctccatggtttagtactccaagcccatacataacaccagtctaaccatgagaaaaccatcaggcagatccaaatgaggaaaattctatcagatatccagccagcacccctcagaactgttggggtaatcaaaaaaaaaaaaagtctaagaaactctcatagaccagaggaagtttaaaagacatgatgtctaaatataatgtgggattctgaatggaaccctggaacagaaagggtacacaggaaaacaacaataagaacaccaacaagaaaaactagtgcaccccaaataaagtgggtttagttagtggtagtatatgagtcttagtttctatttgtgacaaagtatataataatataagatgttaacaatggggaaactggaggacgggtatccaggaactctgtactatctctgcaactgttctgaaaatgtaaagcaattatagtattaatagtctattaaagaaagaggtagatgatacagtaccagtgttgggtgaaacatgatgaaagagagcgtaaaaattttgagggacatttggatgttgttctaaggtattaagaccttacatatatatcaacagtaataaaaataaatagcaattatgtactcattgtatgtcagaaaatgtgctaaaagcatttaatattatcttatttgtacttcttgcaaacacggaatagtagatgttattactttcatttaacagattgggaaaataaatattaggaaatgatataacttccttaaaagagtagacacaattgattagtaggaaggagatttgaatccatgtattgagccttttattcactgtgccctgaagccttattcatatgaataaattatattcaaggttaaattattgtatgtctacccatcatgctggactaatatattagtgctatttcaaatttctctgtcaatatgttgtagctataaaggtaaatcattgttctatctgactcactcagtcacaggcctggcgcttcacccatctaataaaatacaagcagaggttcagccctggtccctggagaggaaatgcacctgtgaatgtgtgtgagcacacacacacataggcacacacacacaggcacacacatacacataccacacaacccatacgggcctggtgaattataggtgctcagtcatgacactgtaacaccactactattaatattatcttcaaaaattaccagcaaatgaattcaatcacccagtcaaacctgtaatgttcccttttagctatagtaaacagacaaatagcaacaaatatcaatggactttgcattagaaactaagcagaaaaaaaatccaattggaaaaatccttttgcacatttattttcagctgtctccatgcagacaaataagggatcacattacctctgtcattgaccttattaattagcatttctagaagcttacatttatagagcagtttgtacttatgtagcaatgacaaggtcattttcccattaagtgccataggaagatgttgaaaaagatcttgactatctagttttttaataggtttaaatgattgtttgccattttacattctctgctgtgtggtctgattattcagcattctagagttagagcattaaagaggcttaaactattgataaggctgccctaattttgcaacgacaattaaaaatgttagcttaggctgggcgcggtggctcacacctgtagtcccagcactttgggagaccgaggcaggcagctcacgaggtcaggagtttgagaccagcctgaccaacatggtgaaaccccgtctctactagaaatacaaaaattagctgggcatggtggtgcacgcctataatcccagctactcaggaggctgaggcaggagaactgtttgaacctgggaggcagaggttgcagtgagccgagatcgtaccactgcactccagcctgggcaacagagcaagactccatctcaaaaaaaaaaaaaaaaaaggcagcttaaacatgagttacagaaatctgaagatacacaaactacaggaatgaacaccctagacagaatgtgagccaacttctgcagaaagagatttgagtgactgcaccaaatcttcatagctaccaaacccatggctattgggctgcttacttcagaatcttggatcttaggttctggcagaaggaagataaagcaagagtaaccagtatgctctatattaaatagttagtccttgtataatgagatgtgtattctattttctcagtatggggtattcttttctaattttgaataataaagcagaatgccagtatccaactgagactgtgccctagtaatcttcaaaatgaaatagatagctggtttcctgtattaatatccagaaaagacatttgccatattaaaattttttataaattttataaaatttataaaaatatgtgtaccattaggaataataaatactatccagtaaagtaaatataaacaccattctgtagagtaagtaggacttagttgtagctactgttttgcttttttgtttaatagagtgaagctcaaagttttaccattgtatttgtatttaccagctttctacctaaagccagatataagggtttttggttttttttttttttttttttttgagacggagtcttgctctgtcgcccaggctggactgtagtggcacgatctctgctcactgcaagctccccactcccgggttcacgccattctcctgcctcagcctctcgagtagctgggactacaggtgcccgccaccacaccggctaattttttatattttttaatggagatgggatttcaccgagttagccaggatggtctcgatctcctgaccttgtgatcggcccacctcggcctcccaaagtgctgagattacaggcgtgagccaccgtgcccagccagatataagtcttttaaatgtgcaatgtatgtaaaataaaacactgaatctctttgaaaaataatatgaaaaagttctcatacaagcagtgtgtttcttcagatatcataatttgatttcttgcagcaaaagttcatttccaacactcagcagaattaatcaagcacctaataaaagctggagtgaattatactatgcaggtaagctactttcttagaagaacgtgttttcctgctgtgttttttcacttgtgagatacgcaacacagcttctctattattccattctccctactattattttttaatatgttttttagttaccaaagattgtgttctctgttcctgattacaccgagaatgtggatgaactcatgctttacaagtgaattgcatgaatcctttctaaattgtcattttcctctcagacttattcatatcccaaatattgaattcttttaaaagtaacaagtttctacttcccttcttgttccttttatcttttcttccttttgttgttcctttcttccttttcttgttccttttgtcttgttcctttgtctttattattaaatatgagagtttattattaatttatttttaaatatgataatttataattctcataataaatagtggataaaaaatgtttggggaaatattacaagaaaagaagagaggataaaaggccatttgcactaccatttatgtctgtgcattcatacatttaatatatatttatcaaggacattacagtggtcactctgctctatgagtaacaagacatacattacactgtcaaggaggttccagtctgatataagagtcatagaaggaaaaagtaaagtcatttaaatttctcagcattcagaagaaccaaaagttgctcaacctgtctaaaacacaaactaccacgtttaggataatgaaatatgaagctatacagataaacaaatgtcaggtcattccataagcaatgttgaggagtatggagttttattcaaagggcaatgaggcgccatttaaacctttgtactcaggaattaatgggataatatttgtattttttatttgtattttagaaacagtaacaattttgtttacattggaaagggaattgtcaaagtaaataattgcaccagacaatgttaaagaggcaaggaagaccttatgaaaaactactgcaaaggagacaaagactgaactcaatgctctttaaataaagagctggaaagttttctaaactaaatactcctaaaaaggggaggagaggccaagggcctttagtcaaaaagaaactgtccaaagtttagtcaagctgagggcaaggttagtccatctcagtcaacataaacatgaaaaagtctaccttttatggccaacatattctaatttaaataccaaatattaattgacatgattacaattgttttaaaagtttagcatgaataacttagagttgaattaggtttgattttggtcagatattattactcaaagtttccatgacgttagggctcagaaaatgaatgcgagagacaatagcttcttggataatttgaaatcttctttctcctcaatatcttaggtctacccagatgaaggtcataacgtatctgagaagagcaagtatcatctctacagcacaatcctcaaattcttcagtgattgtttgaaggaagaaatatctgtgctaccacaggaaccagaagaagatgaataatggaccgtatttatacagaactgaagggaatattgaggctcaatgaaacctgacaaagagactgtaatattgtagttgctccagaatgtcaagggcagcttacggagatgtcactggagcagcacgctcagagacagtgaactagcatttgaatacacaagtccaagtctactgtgttgctaggggtgcagaacccgtttctttgtatgagagaggtcaaagggttggtttcctgggagaaattagttttgcattaaagtaggagtagtgcatgttttcttctgttatccccctgtttgttctgtaactagttgctctcattttaatttcactggccaccatcatctttgcatataatgcacaatctatcatctgtcctacagtccctgatctttcatggctgagctgcaatctaacactttactgtacctttataataagtgcaattctttcattgtctattattatgcttaagaaaatattcagttaataaaaaacagagtattttatgtaatttctgtttttaaaaagacattattaaatgggtcaaaggacatatagaaatgtggatttcagcaccttccaaagttcagccagttatcagtagatacaatatctttaaatgaacacacgagtgtatgtctcacaatatatatacacaagtgtgcatatacagttaatgaaactatctttaaatgttattcatgctataaagagtaaacgtttgatgaattagaagagatgctcttttccaagctataatggatgctttgtttaatgagccaaatatgatgaaacattttttccaattcaaattctagctattgctttcctataaatgtttgggttgtgtttggtattgtttttagtggttaatagttttccagttgcatttaattttttgaatatgataccttgtcacat

SEQ ID NO: 198 - DNA, 3379 bp, Homo Sapiens
cgccccagttccaggctctcctgcttctccacggactctgcgggaagttagagcctctgcgtgcgctccggggcccggcgagaggatgcgcaaggtggagagccgcggggaagggggcagagaggaactgggaagtaacagccctccacagagaaactggaagggaattgctattgctctgctggtgattttagttgtatgctcactcatcactatgtcagtcatcctcttaaccccagatgaactcacaaattcgtcagaaaccagattgtctttggaagacctctttaggaaagactttgtgcttcacgatccagaggctcggtggatcaatgatacagatgtggtgtataaaagcgagaatggacatgtcattaaactgaatatagaaacaaatgctaccacattattattggaaaacacaacttttgtaaccttcaaagcatcaagacattcagtttcaccagatttaaaatatgtccttctggcatatgatgtcaaacagatttttcattattcgtatactgcttcatatgtgatttacaacatacacactagggaagtttgggagttaaatcctccagaagtagaggactccgtcttgcagtacgcggcctggggtgtccaagggcagcagctgatttatatttttgaaaataatatctactatcaacctgatataaagagcagttcattgcgactgacatcttctggaaaagaagaaataatttttaatgggattgctgactggttatatgaagaggaactcctgcattctcacatcgcccactggtggtcaccagatggagaaagacttgccttcctgatgataaatgactctttggtacccaccatggttatccctcggtttactggagcgttgtatcccaaaggaaagcagtatccgtatcctaaggcaggtcaagtgaacccaacaataaaattatatgttgtaaacctgtatggaccaactcacactttggagctcatgccacctgacagctttaaatcaagagaatactatatcactatggttaaatgggtaagcaataccaagactgtggtaagatggttaaaccgacctcagaacatctccatcctcacagtctgtgagaccactacaggtgcttgtagtaaaaaatatgagatgacatcagatacgtggctctctcagcagaatgaggagcccgtgttttctagagacggcagcaaattctttatgacagtgcctgttaagcaagggggacgtggagaatttcaccacatagctatgttcctcatccagagtaaaagtgagcaaattaccgtgcggcatctgacatcaggaaactgggaagtgataaagatcttggcatacgatgaaactactcaaaaaatttactttctgagcactgaatcttctcccagaggaaggcagctgtacagtgcttctactgaaggattattgaatcgccaatgcatttcatgtaatttcatgaaagaacaatgtacatattttgatgccagttttagtcccatgaatcaacatttcttattattctgtgaaggtccaagggtcccagtggtcagcctacatagtacggacaacccagcaaaatattttatattggaaagcaattctatgctgaaggaagctatcctgaagaagaagataggaaagccagaaattaaaatccttcatattgacgactatgaacttcctttacagttgtcccttcccaaagattttatggaccgaaaccagtatgctcttctgttaataatggatgaagaaccaggaggccagctggttacagataagttccatattgactgggattccgtactcattgacatggataatgtcattgtagcaagatttgatggcagaggaagtggattccagggtctgaaaattttgcaggagattcatcgaagattaggttcagtagaagtaaaggaccaaataacagctgtgaaatttttgctgaaactgccttacattgactccaaaagattaagcatttttggaaagggttatggtggctatattgcatcaatgatcttaaaatcagatgaaaagctttttaaatgtggatccgtggttgcacctatcacagacttgaaattgtatgcctcagctttctctgaaagataccttgggatgccatctaaggaagaaagcacttaccaggcagccagtgtgctacataatgttcatggcttgaaagaagaaaatatattaataattcatggaactgctgacacaaaagttcatttccaacactcagcagaattaatcaagcacctaataaaagctggagtgaattatactatgcaggtctacccagatgaaggtcataacgtatctgagaagagcaagtatcatctctacagcacaatcctcaaattcttcagtgattgtttgaaggaagaaatatctgtgctaccacaggaaccagaagaagatgaataatggaccgtatttatacagaactgaagggaatattgaggctcaatgaaacctgacaaagagactgtaatattgtagttgctccagaatgtcaagggcagcttacggagatgtcactggagcagcacgctcagagacagtgaactagcatttgaatacacaagtccaagtctactgtgttgctaggggtgcagaacccgtttctttgtatgagagaggtcaaagggttggtttcctgggagaaattagttttgcattaaagtaggagtagtgcatgttttcttctgttatccccctgtttgttctgtaactagttgctctcattttaatttcactggccaccatcatctttgcatataatgcacaatctatcatctgtcctacagtccctgatctttcatggctgagctgcaatctaacactttactgtacctttataataagtgcaattctttcattgtctattattatgcttaagaaaatattcagttaataaaaaacagagtattttatgtaatttctgtttttaaaaagacattattaaatgggtcaaaggacatatagaaatgtggatttcagcaccttccaaagttcagccagttatcagtagatacaatatctttaaatgaacacacgagtgtatgtctcacaatatatatacacaagtgtgcatatacagttaatgaaactatctttaaatgttattcatgctataaagagtaaacgtttgatgaattagaagagatgctcttttccaagctataatggatgctttgtttaatgagccaaatatgatgaaacattttttccaattcaaattctagctattgctttcctataaatgtttgggttgtgtttggtattgtttttagtggttaatagttttccagttgcatttaattttttgaatatgataccttgtcacat

SEQ ID NO: 199 - protein, 789 aa, Homo Sapiens [sequence omitted]

SEQ ID NO: 200 - DNA, 6388 bp, Mus Musculus
tcgctttccgaggcggccttcctactcgtgtggtctttgtgacttccaccatggcgtaccgcggccagggccaaaaggtgcagaaggtgatggtgcagcccatcgtatcctacgctgcgtgaactcggggctttgggggccgtaggcgccgtgagcgtgggcggggagccgggcagcccgctgcgggccgcttcccgtgaggccctggggcgaacggggaggcaggaaagcgcgcggagttgaagggcggcgggaggcgggaggcggaaggcgggctccgggtggacccggccaggctggcgatccgcgatgaaagcgggggataccgaggaggagaggaggatgtgggccatcgggaaggttggagaaacgagggcggtggggagggagcgcatgctcccggcggtcgtttgtgcttgcggatgtagcccggccggaccttggggcgctggagagtcgggcgcggttgggagcggaggctccgctgtttgtgtagttcttttccttgatcgccgtgctgcagaaccttatcttcagatacttgcaaaatgtacgtaagttgtttccttactgttactgaaatgaaagttgggcctgtttgactctttgtaacaaattctctgtttctagtgcttagactaaaaaattgggggggggggggaccagagttgaggataaggtcacagggaaagcgctaattattaatatgtccgtgctaacttaaggatgcacacagttaccattattctgtaagaacaatgtaattatatttactattaaaattactctgtaagaacgatttgtcatcggatttagcagtgacagttgcatagtgctttttccatagttggacttagaatggagaaaagacaccaaagcggggtttgggggagtgggggcgttatatacagagaagcgagtggcaaatgctcttctttgaggagattttagcgatgtttattttagagtgttacaacacagatgaaaaatcgttttaagccattgtaatttttaatcgccagattcgctttgtactatcctgtgaacagttctaactgtaagtgtattcatgccagaagcaaaaataaattttcagagtaggaaaattagtttggacaggcctgcccgagcacttattaaatgtttctcagcaggttaaccagtgttgctagctcttagatgaagactaactagttctagtttttggcttatatttattggaatttttaagataagtcgtttattgtggaaacaaagtaatggagtgggatttgtttacatttctaaagtcattatttttatttcagagatctcgaattcaggtgtggctgtatgaacaagtgaatatgcggatagaaggttgtattattgtgagtacccaggctatttttcctcaagttgttattaaaaaagacatctcagaagatggccagtaagaacaatatacaaggcgtcaaggacccaacccaaagaaagctcttcagagctggagttatttatttagccttttctccttgctctggttaatagggttagataatacttctcttaagaggaagggaagggagaggttaggcggtggtggcgcacgcctttagtcccagcactcgggaggcagaggcaggcggatttctgagtttgaggccaggctggtctacagagtgagttccaggacagccagagctacacagagaaaccctgtcttgaaaaaccaaaaaaaaaaaaaaaaaggaagggagagttaagacttttaagaagagcttcgtttgtgaggagagggaacaaaaacaaaatgagaggggggcggggagtgataaaggacttgcattctggattagatcatgccagaatagagctggtgggggtgagacttatggtttgttaggcttctatcgtgatggtgttggggatcaaagtacctgctctaccacacagctaccatggcaataagtttttgttgttattttagatttatttgtctgagtgttttgcctgtgtgtgtttaatgcccaaacaggccagaagttgttggctcacctgaagatgggtgattgtgagcttccatgtaggtgctgggaaccaaacctgggtcctttgcaagagcagcaaggaaggatttgtaactccaccacctctcccgtctctgtttttcctttgtgtgaggcagagtcttttaagagagacttacacatggaaatcctcttgtctgagcctcttcaatgtttagattaatagccatgaaaatggaaaaaaaatttttttaaagatttatttatttttatgtgcaatggtgttctgcctactgttatttgtgtgagggcaccagatcccctgggactggagttatcaacagttgtgagatgccatgtgggtgctgggaattgaatctgggtcctctggaagaaaagccagtcttcttaactactgaactgtccagctctggcattgttattttgaggcaagaaattgctatgtagcccagtaaaggccttgaacttcccatcctgcctcagcctcctgagatttacagacgtgctcagcctcactttttttttttcttttttgcatcaagggagtgagtggggttgctttgtacatactcatatgtgtggatgtatgtgctagaggtatcttttattgctctctgctttttgagcctggaactcatggatttaacaagactagttggccagcactaggtgcggctgcaggccactgtgcactgcattgtttgagtagggatccaaactcatgactgcatgtactttaccaattgacatgtctccctagtacctacccttcctcccaaagctgcacagtattttgttattttatgtagatatcaagagtgtctatcaatactctcttaggagttggtaaacaagcacagtagttagtgggagtcgtgttagtgaggaacatgggtgtgcagtgacagaaggcaattcatgtgtgcacatgccgaattgggtagtgtccagcaggcattcctggcgaatatttacctctaagggattgaagtactttggatctcattctagctttctttgctatttaaaaagaggtaggctggggatgcagctcagtagtaaacctcttgcctaatgggtagaagtcggtgcgctaatcctcaacaccatctctgcccccaaaaaggaatgaaaatgcccccacgcattgggcatgtcacatatgaccaggcatggtggcacatacctgtagtctcaacacttggaatagagaggataggagatttgtgagtttaaggctttccttggctgtgtgggaagtttagggcaaacataggccacataagacgctgtctcagaagtaaggggctcaacaggtaaaagtatttactattcttgcagaggaccaagttcagttcaaagtatatacctttgatggatcacaactgcctgtacttctggcaggtggatctagtgcctctgccctccttaagcacctgtcctaatgtgcacgcatcgatccaaaaataaatacatacaggtaacactttaaaagaatacaaagtagttaataagtaagtagaggctgtaggtgtttgtgttgaaaaatcagtgatagcataaaattctaaaatttgttgatatttctgaatctaattattcttttagaatggtcggatgtgatttgcttaaaaatgattgtcatttgccttcccagggctttgatgagtacatgaacctcgtattagatgatgcagaagagattcattctaaaacaaagtcaagaaaacaactgggtaaggagatagttggctttacagatttctgtttatttcactggcagacttgaatggcctatagctgaaaattcatgctataaagttacatttgaagggagaagcacacttctgaattcatcttcctgccacttactctgttacccactcctttgttttgttcattgatagggtctcaggtagcccaggctactctcagtcttgctgagagtgacagattgaactcctggccttcctgcctccccctcccaagtgctgggatcatagacattcgcaaccatgccttgccaaggatgttaaatctgatgtcgttttttgtgttcacttatatttaacattaagtagaatttgacacagttcaatacttccttgcaatactttgatatcttgggtttgtgacatagtatgtcagtttttattcaactctggctgtttttttttttttttccagacttctttatattcatccttttttacccggccattaagtatttgaggctgggttccagctcgcccttcacagtctttccctaggccagcagttctcattctgtaggttatgacccttttgagagttgaacgatatttcacagtggtctcctaagaccatcagaaaacacagacatttacaatatgattcataatagtagcagaattacagttataaattagcaataaaaacaattttattgttgagggtccgcacaacttgaggaactgttattaaggggctgcagcgctaggaaggttgagaggctctgttctaggcttctagtgttcagtgagatcacagctccaggtactaatctgggcattgacttccttatttatgtgtatagcccaaacctcttctgaacctgtttaactttccacatagaaggtttttaaggcagcctgtcagaagccaacttcactgcctgcttacactgttcagcgtgggtttgctgatcacttcctaacggaacagtagtttccactaacttactaacttttgtagctccctcatccatttgaagttgctctccagatgtagccatctttttgaaacactgggtctgaccttaccagcttttgcttgaaattttccattgtctgtttttcctgaggggacagtgtgatgttttggcaagagccttcttatctggcctgatgttcgctcatcttgattcacactgtcccattttctgagcagtctccatgcttgtctcctttcagtttgttttttgttttggagggttttgggctggatttttgttttttggggggaggggggctggttggttggtttgggggtttctctgtagtcttggctgtcctggaactctctgtagaccaggctggcctcaaactcacagagctcactgcttcctggagtgctgggattaaagctgtgtgcccccattgcccagctcttctttcaattccttaagcctgcacattggcctcactttctgtttgaggtaggatcttcctgtttagcccaggctggccttaactctgagatccttgcttcattttctaaatggcagtgttaacacaattatcacgccatggttattacacttgactccatcaaatattgctacgtgtattgttcactgatcaaactttctctaggaaacccaaatttaatttagtttttctgggatgggagaacacaagatgtgatatgttgactctgtagtgaatcatttattttatcgttgcctctttgttagactgcatgctccctgagtgcatgagtcatgtcctctctgcttccaatgaccaccgtagtgcttcacataaactcagaaagcccagggaacaagaggacccatggtctcattaagagatactttactgaggttaggttatcttttgttagaatagtcagtgctcacgtgcgtttattagtgatggagttcaggtatctctttcccaaaccctactgaccaaagctagataggtggaaggtagattctaagaaatgactctgtttttatttgcttttgaggtgctctacctctataacccaggctgtccgatcttaccttagccttccagtactgggactgcaggtgtgcactgtctcacgcagcaagaactcaggctactgcagatggaattgaaatgtatacttgacaaacactcatttctaaaccctcatgaacttagtattgggagatgctgtattgggccttttcacttgacctagactataggaactatgtttcattaaaacagcgctgtttcgttctgttactgaaagcccagtagacctggtggaagccttcaatatggacgattgaaaatgttcacatagcgttatgagagagagaagtgcctcagtactattcagagccaaactctgaggctgaaagataagtaaatgtctctctctgattagtcacagcttttgtaacactttttttgttgttacaggtcggatcatgctaaaaggagataatattactctgctccaaagtgtttccaactagcagtgaatggtgaagtctgtaggatgttgagaaggccccttgagcgtgtttaaagatgtctgctgcaacctgcatttactcaacttgttttacttgcacattattattaggtgacaataaatgctgtaggaagtttttgtta

SEQ ID NO: 201 - DNA, 453 bp, Mus Musculus
tcgctttccgaggcggccttcctactcgtgtggtctttgtgacttccaccatggcgtaccgcggccagggccaaaaggtgcagaagaaccttatcttcagatacttgcaaaatagatctcgaattcaggtgtggctgtatgaacaagtgaatatgcggatagaaggttgtattattggctttgatgagtacatgaacctcgtattagatgatgcagaagagattcattctaaaacaaagtcaagaaaacaactgggtcggatcatgctaaaaggagataatattactctgctccaaagtgtttccaactagcagtgaatggtgaagtctgtaggatgttgagaaggccccttgagcgtgtttaaagatgtctgctgcaacctgcatttactcaacttgttttacttgcacattattattaggtgacaataaatgctgtaggaagtttttgtta

SEQ ID NO: 202 - protein, 86 aa, Mus Musculus
MAYRGQGQKVQKNLIFRYLQNRSRIQVWLYEQVNMRIEGCIIGFDEYMNLVLDDAEEIHSKTKSRKQLGRIMLKGDNITLLQSVSN

SEQ ID NO: 203 - DNA, 450 bp, Homo Sapiens
gtgaaattccaccatggcgtaccgtggccagggccagaaagtgcagaaggttatggtgcagcccatcagcctcatcttcagatacttacaaaatagatcgcggattcaggtgtggctctatgagcaagtgaatatgcggatagaaggctgtatcattggttttgatgagtatatgaaccttgtattagatgatgcagaagagattcattctaaaacaaagtcaagaaaacaactgggtcggatcatgctaaaaggaggtaatattactctgctgcaaagtgtctccaactagaaatgatcaatgaagtgagaaattgttgagaaggatacagtttgtttttagatgtcctttgtccaatgtgaagatttattcatattgttttgattaccgttgtgttactacaagatggcaataaatactatgggattgtttgtgttaaaaaaaatggg

SEQ ID NO: 204 - DNA, 418 bp, Homo Sapiens
gtgaaattccaccatggcgtaccgtggccagggccagaaagtgcagaaggttatggtgcagcccatcagcctcatagatcgcggattcaggtgtggctctatgagcaagtgaatatgcggatagaaggctgtatcattggttttgatgagtatatgaaccttgtattagatgatgcagaagagattcattctaaaacaaagtcaagaaaacaactgggtcggatcatgctaaaaggaggtaatattactctgctgcaaagtgtctccaactagaaatgatcaatgaagtgagaaattgttgagaaggatacagtttgtttttagatgtcctttgtccaatgtgaagatttattcatattgttttgattaccgttgtgttactacaagatggcaataaatactatgggattgtttgtgt

SEQ ID NO: 205 - protein, 52 aa, Homo Sapiens
MRIEGCIIGFDEYMNLVLDDAEEIHSKTKSRKQLGRIMLKGGNITLLQSVSN

SEQ ID NO: 206 - DNA, 450 bp, Homo Sapiens; identical to SEQ ID NO: 203

SEQ ID NO: 207 - protein, 92 aa, Homo Sapiens
MAYRGQGQKVQKVMVQPISLIFRYLQNRSRIQVWLYEQVNMRIEGCIIGFDEYMNLVLDDAEEIHSKTKSRKQLGRIMLKGGNITLLQSVSN

SEQ ID NO: 208 - DNA, 20754 bp, Mus Musculus
gaggctgcgtgaatgcgggagacagggagcagcgtcgcccctcgcgctgttgctgccgcaggatgcacacttgggctggcattgccccaacccaacgtgaggccccgccccgtctctgggttcagaatctcgaatcccttctagcatcttcccctctcttcactgggcctttggtatgccccaggggacagatgtcttgggatctttaacatttgggatgctgcaaatgccgaagttaaatgaaatacctccggggaggggaggcccgggggagccttggggagagggaagatgggcgggaccaacaggtcctgaagctgcgcgaccggcgcggggggcgcgggggcaggcgcgaggcgccagagctcggtgggacaggtaaggcggaaacttagtgaacggagcgcgggagaactgggggggggaatcgaggaaatcgagctcctgaacctcggtcttcatcctctgcagaggcagtcttgcagggaaagggggtaattttaccaaggggtcgagcattcccgaatttctaccccaaagctgtttccaacggccaacctttctccttcgactcactcccccggccggtggctctcctggccaggttccgagaaggcagaaagcaggcaaacaaaaggagccggagtcccaggccggcctagaaggagagggcgcggtgggggaggggctggggggggacaggacaaaggggctttttacagagagccttagaggtttgatttcagggtgcatcttctgttacccctagttctccaccctggcttagttgaggtgaatacctttcctagtggccagagaggagtggagaaagaaaacagatattcttccacccctcctgcccagagagtccccgactatttcccgagctccgcggctggtcattgatttgttaatgcactaagtaattgtgggaatgctggtggttgtgctttgctgggtgctgttggggtgatgtggtcaggttgaaggacttggttttaaaaactttgactcctaaagtatcacagaaacttcgggggcagcggagagagcggagtatgtttggttacaggtctgtgaaagagtttggacacgaaaggttttgaagagatggctgtcgtggaaagggcttgtcttccacctagatgggattccggtgctagaaaatctcacttcctcgcctgtcctcgtagccagtggctctgggacctgggatcagggaaaatgggtgctgagttccaagttagttttaagcttcctctggagagtgcccacctatcccttgatggtgtcttccgataacatccatcttggcaggaggactgttagttaggtcagcctaattccaaaccctagattctagtggattggggggatgccgagtttggacttggttcagtgcaagcaggttggtctgtaaatctattgctgagcaacggattgatgcccatcttcaatggaaggcactgccagtgctgagtttctgcaaaacgagaggaaaaaaaaaagaagaagaagaaaaaagcttcattgcacagcctcctgcaggaggcccggagggtaagccttcctccctggtaggtgggcatcgaagagtgaggaagctgctgattggctccggggcttgcctctttgcaggttgcctatttcttggggtgggctgtgtgtgtgtgtgtgtgtgtgtgtgtattgggggggtgttatgttctgctagaggggtttgggtttgtgatatcagtgacctggcttctgctcaagactgttcttgaaaagctggttttcaagcgctgagaatcattattgagagcctggaggcttttcctggaagacagtttaaagaatgtatgtcccggtgtgtacaggccttaacccgagtttgcttttggcccctgaattcagatgaggttacctgaggccagagtgctcagttgactctaaaacttacactccaggctgctgctgctgcagcagtacctgtgactttcacatgcagtcggttatatgtaaagagtttcattcatgggttgtttgaaacgaccggttgctgggtcctgtttaatattaataacgaagtatatatgatatgttcttatggtttcagaactgtatttcagcatgattgggcttcgtaattggtctctttgttttatatatgtaaaactgagctatgagctgattctagaaactccaccacagcccccagttggaactgggggatgggccaaggcagctcaagccctttcagacactggaagaacacggaaacctgttgggggatgggaggggactgcagtattgtggaggacttggggggggggcaagaaaggctgtgggttctttgggaggttcagaaaacatgctccccacagtggggagggtgtgtccccggtgagggcccctcagcctctgcttggaggaggtggtcagcctgtgagactcgggctagcattgtttggaaagagggtgtgtaccggaatgtaaaggtatgggaggggggttgtgtcgagaaggaacggtgttgttggtgaaaggtggtggcagcctgtgacatagctgtgtacaggagatgcttaacagccagctagggcatggagtgggagcaccgagtcccctgggggggggggggagggctgggagaaggaagtagcttgggtgtgcattgagacctgagacctgggtcccaaaggtggaggatgggaggtgatgagacaaagatctgagagatacaggccagtctgctgtatccttctagcctctgggagcaggcagcagcagtcagccttagctctgctcgccactccaaagcaacgtattccaagcaactttttgtttgcccgagggtccgtgggacagagcctggaggctgactttttgcagggacaaaggtccattttagtgagtatggagacggcgctaaggttggaggttactgttgcttttgtatggagtaagggatgataagggagtgtgggtcagtgccccatggatagcagtgtttggggtgcacagagattgcaaatgggatgtggtgctcttgatgtggctgggattcgaagaaagcagcactgtcctccatctgcctagcatcctagagtctctgcaaaagcagccctggcctgtttctgttgtccctttggttttgtttcttttctaggtcctaggttttaaacccaagacctctggcttgtagtctaccaacgagttctataaactcacagctaccgtttccttctgtttttttttgtttttgtttttgtttgcttgtctgtttgtccagattactatcttcctctgttgcccaggctggtcctcagtctatggatggcctcatgtgatcctcctgcctcagatcacaagtagttgggactctaagttgctagtggtgcctgccacaaccccccagcgcagtctgaggttttgagatcctaatctgggaaggactgaggctgtgatctttagtccagtgtgtcaggagagctgtgactctgtgagcctaggttttccaagatgctccctgcggacaaagagtttcttactctgttttggtttttgtttgttttgtttgtgtggggggcacttattcatcaatttctagaaagagaaagtgagacaagggagacaggagggaactggagggagggcactgaagcaattcatagctcagcacactattagggttccttgtggctacggaaacttgactctgctgctgccttctggttctctttcatggggagccccttttccctgctcccctccgcccggaagtgcagaggcctaggagctgcctgccggcaactgccagcagccggattagttcagggaaggacttgctcacctgctcctcccctctgactcaagtcataacaggtaacctggttcccctggcccggccgcctgggagggacaacaggcaggcgggacctgatgagagggagagccaggggacggctagcagcgtgtggtgagcttcctgggagcaagagcaccaggcggcctgggagaccttgaggtgacatgagaggtgcctcaatgccctgatctggaagcaggagtcttccttgatctggactgagcttggagcaggtgagagttgggcagggtaaggacaatctttggggttgagcagcaggcagaccaggaaatggaaggatccccaaccagacatggtaacattcccttactcctaaaatcgtttctgggctcaggggtaattgggggactgctaagtgagtttggaaacaggaagcctgtgtctatgagtaggcctaaatttccaacagagatgagctggggcagagaggacctggctttggaggcacatttgtgatggggaggactcccagtggcttccctgaggtaaaggatgctggagtttcccctctttcaaagcctttctttctcccttgggctttgtctggggatagctttgagcgggtgtgtgtgtgtgtgtgtgtgtgtgtgtgtgtgtggctgcttctgagtgtctgtgctgcctgggaacagcagtggggcagacaggctcctgagttggagaggtgtaaggatgttatctaaactgcccttatctaaagtaagaactttcacaccaaggcccgatctcctctgggtgggtctgggctgcccttgtgcattctggggaaagttcctcatagtggagagctgtgctctgtgtcagtactagtattattctttgtctggtcttgcccagagaggtcctaattcagatatagggcctgggaagggccttaggcctttctgattttccttgtccttgtgaggaaaactggggcttagaaggccagagtccctcctcagctgtcccaggaagctgctcaactgatggtggaatggattcgggtctctgagcctgagctccttgcccttcttggagcagcaagtgagcccagagtggaccttggcgatagatgatgaggctgggtccatggtgaataataacaaagcctgaaggagaggcatgctaaaacaccccttagtctcagaacgaacgcccctcttgtctgccgcagtctgaccctctccttaccccaccccccatcccgagggagggcccgagttatttcagcctttcaaggcaacttcttagtggttaataattaattaacaagtgtgactaattgatagcttccctcccacttactccctctctctgtccaaagcaaactggcttcaggtgccagctgccagccctgctagagtcctggtcctgcttcttagtttaagatgatcttgcccccttctggggagggtggcaggaaggcccagctgcctgcttctctgtgctagaaaggacttgagataaaggaaactaccagtcaccctaagctcctggaagctctgggggtcggacgaccagtcttcagtgcgtttgcaaagccacctcatcaacttgtattccttttattctccttttcatcctctagactttgcttgaaaaaactgaaattccagagtgcaaaaaagtccatgtcagttccagggccgtggttttcattcagtgtcactgcccacagagccctgataagccgtgctctgtaccctctctggggctcagctggcagacatggggagcctagctggccgtagtgggcccctctcctctaccattctgctcagtcgtctgccatgcagcgacggaggccccctcccccctcactgcagccgttgtgctctggaggcagcaggatgagccccagacagaaactccgaaggacttttggactcttgctcaatgggctgactcagtgaggaggtggctggcctctccttccagacctccgcctggattccaccctcccctccccacccctgctctggctaacagctgccaaccctggccagctgggatcccaccgagggtgtgggtttgggagagagataggggtggtcacaggtgttgttgtggtgagtggtgtgctgggctgcacctacaccatcaaagtgacgaccagtcagaggaacgcgtgttttcctttctgtcattggtaacttctagtctgccattgtctctaccaacaatccaatagatcccctccaccctagccgtggggtgtagggtctgcaggctaactccccgttgagaagtttcctagggtaaactgctgacttgggattcaactctgcttccccctgcctggtgaatgaccaggtccagacaacatggtgcaccggtccttgggcccctggccagccttggctttgtgcccactgtccaggccttttctcatcatgctttcaaacagtggggcagtaggccatgcctcaagtctcccgtgttcaagctgagagcagtcatacctatgaagagtccttggctttgccagcctgtccaatcttcccatctcctccttttcttctctctgttctctttcttattcttgtacagccaccagtgcagtaggcccctttggacccaaagactttttgggggggttgagggactaggctgaaccctcccttggaatgccttcccaccccagagcacactgagaacccctccccccagatcattccagagacacaacccgcacttccattcccgacgctcaagcattgagacttcatagagcattttggttgttatcttctcttaaaagctgggaacactccagactacctacacatcctggcccaggctgggaccagtgcagcccctccttcctctgtgccccctcttcccagaaactcatcatggagagtaaggatgaagtcagtgactccgacagcggcatcatcctgcagtctggtgagtggatccaggaaattcccctgccctgctccctgactccagagtgagtccctaggccctgggctagctgggctagacctcccaaagggctggggagaggagggaacggaggggttcctgctggagaagtggaacggctggaagatctggcacctcaaggaactgccgttttccttgctggaaggcaccaaccagccaggagttcctgtcctatctggagcagagatcagttttgtccatcttcagctccaatgcttactaagaagtgggaacactgtatcttgctggtgttaatgtcccatccctactacgcttgagcccgtgggtctagtctggcctggttttgatagaggacgggagaggaggaggaagagaagacacatgggcccctcccacacccaggtcaccctggtgggacagctctccctttgaactatagcagccaggagacatgatgtggctgtgacacaagccataacggctagcctgtaatttgtgggcaagcatgagacggtatgggtgtgcactcccccagaggtggccaacagtgtcctagggatgccttgcttcagcgttcctgagcaggtgtctcttatctccctgcaggcccggacagccctgtctctccaatgaaagagctgaccaatgcagtacgcaagcagcagagggctctggaagcgaggctggaggcctgcctggaggagctgcgcagactctgcctgagggaggcggtgaggttcctaagtccctgcccccccaaacttagcattcatctgaggagtctcaaaactataccaaggggaaaacccttctaggggattggaaattagactgaggtgtgggcctagagtttctgtcattcgggtttgacctggacactgggtagacctgagtagggtctcaagtacaggaaaggaagcgatgaggggatgtgcagaggggccaaagagatggaagcgcatttgatagctgtaccttgggtcagggtggccctcaggaggaagcgaccagaggggataagaaggcaaagggagaagaagtgttcttcaaggatgcgggaggaagacaactgtggcagatgggacgaggtgggcagaggtacaagtgtcccgccattttaggggcctctggaatatcaggtccatgcagtgtggagctgggtgggaagttttaaatgatcggtcaagggctgggcaagcagagaggggtgaaggggcccgacttgactctgcccccctctaggagctgactgggactttgccggcagagtatccccttaagcctggtgagaaggcccccaaggtccggcgcaggatcggagcagcgtacaagctggatgagtgggccctccacagagaggtgaggaacgtcagaggaggtggtcgctgtacctcatccccaaaggctgactaccagcagtgcactggcaatccctgtcatccatgtgggcggtggccaatcccaggcttctcaggagtggtccagatggctctgagtaggcatgccacctcagcagcttggcccctgtggcagaggattaaaaagaccaataaccagctcaaaaagccagttgcctattcagggaggttggtgtggcacgaggcctatcctttctcagcctaggtggaagggagtagggtcactccaaccctagatgaccttcctcttggagagatttttgtaggttgacatgcttggtcctttggggtcaggaaggaaagtgacctacttaagtcttctcccagcccggcacagcaggtagcagggggtgggacgattgtggcaacttttcatggtgacaagttggctctgggctgctcccagtgccccaccttttgctgtgtatccctggacactgcagtctgctcacaactgggtcagagtctcttggagatttctgtcctctaagcgccgaggaccctcttagccctcacccccaacccctccctcaggaccccctgagcagcctagagcgccagttggctctgcagcttcagatcaccgaggcggctcgaaggctgtgtgcagaggagaacctcagcagacaggcacgcaggcagcggaagcacgctgcgctgcaggaggagaagaagctgcgggaccttcagcgttgcctgggtgatcggcggcggaacagtgagccccctcctaccactgtgccctccctgggcagaggtgagcccattgtcctgagccatgaaagcctcacacagctcttgtgggacggccagtgtggccctgcgttatgctttcgatagcgcctgtgctaatactgtttctcgtcagcgccatcagggtactcctttctgggtccaaacaggtcctttcttacctatgtacccgacaaggcatctccactctgggagaccttcattccgcttgcatctctcacgtagtgtaccgctcccacaagactttatagacagaaggcttttctctgtttgatagtaatccaagtgtttattcaaactcaaatactatcttgagggagaaaagttcagtaggcagaaggctctgcagcgatgctcgttcagcatctttagggaattgctgttgctatgggtagccaatgactgatgggttcagggccacatacgcatgggtgtttagactgaaatccagtcataactctacagtcccgtcagtgtctgcaactggtcaagagtgctgaaccgttcttgtagcctagtgactgagccctgacccagagatgaggctgcggggcacctcagaaccagagccagccaaatgacttcagtgtgcccggtctggtgagcttctagtgcttttgaaccctgagatgggaccgttttctttgtcctgacccaaatcctgtcaagttgggacttgtagcctccattcctccagtcccagatcagctctggagtcagtctcttgcttggctgtgtcttaaggaagtggtaagagggacaagctgctctttacccagagcctcaggctcagcctggggagcaagcaggcttccccatgtcctggtccatactcgaatatcagctggttcttgccctgcaattctcttctctggctggacacagtagaagcttcaaggtcctccccaccccctatgctgtgtgcctcaggcaggcattgctttcagtacctgtgacctccaggacaaagcgtctgaacagacaccagccaggccacccttggaagcctggcgtagatggcaaggaacaacgtgttcttccatgtcttgactgaccaggaaaactgggcttagtggccaaaccctattctgctttcagtggctctggccctaatataggacatcactgtcactcgccaagactctaaggaaaaagtcattctcagttcttcattttccacaggccctgggtatggtaaggcacatgctgatggaggtataatggtccccgagggccacctctgtacttgaaggagccattagtgtagaaatgtgacctgtctccacacccctcttcacgtgcactgttcagctcctttgcccataggtgctggcactgccaggagcttttgcgcagggcggggctttggggggaatgtcactactactgccattgtgactgatgacactccttgttgggagtgaagaagcaggccaggacatgcctagggctctggcttaaccctgtgtaggagggaagaaggctgattttctcagagcctttagtccgagaggagatagagggcagaggaaccaactggtatagccagtgacttgtggctcccacacggaccccgccctccagacgagcctgaggttctgggttctagtgtctgacttgggagctcaaaagaaggttgttctagacaagttgttcctgtttctcggctcctctgtctgctgtactcacctgggaaggaggaagtagaaagagattaataattagtttgaggctagaggatgttttgaattaaaaaggaaaaataagcaaacaaaccaaaattaaaaaaaaaatagtcaaaacgaaactccacccacccccctttgcacacaagggttattcaatttgagaaagtaattagccagatgagggtaattaattagtcagctctctgcaggtggtaaagagcagacaggtattgagctaatttttattacaagcgagcccaagaaccaccccctgtactcctccgacggagtgagtaccctgtttgtgtttgtcgattgactgcgtccgtctggagcaacactggctaatagcagcccagtgatgatcgaaatgctgtgtgtccaacgtggtgactgctagctgcatgtagctactgaatgtttgaactgtgccccccagtaaccgaggagctaagtttttaattcgaatgagtgtggctttgtatcgtacggtttgatttgttgggcagggtcgctttggtctcgtggtttcaactctgcctggggtactctgccatggctgctgggggagagtcatggtggagcaggaccagagtgaaccaggactgacttgagacagggctgagacagtgagcatctcaggagccatttgcagttggcagcttgtgctcccagcttttgtccctacagagctttgtgccccaagacttcccttgcagcgtgcagctttgggtccacagagctgatgtcttgcttatgtggtcctgagaggtgatggggaatgactgatgtcttgtttatgtggtcctgagaggtgatggggaatgactgatgttttccttcccaggctgttacattgtaagcaaagcctacagtctgaacccgtgatacactaaggggctgagagagtaacacgtgggtaatcccttcaacctgacatttgccaaagataaaataatttttgtaaaagacaaaaaaccaagagaacgagatttcagtaagagcgtttctcttccactgaaccctagaacaaaggttaactatgcaacccttggctggctactgggcagcccagcacagaggagaagaactgccgtggcaattttctctgtaaaggtctggacagagaataattttacactttgtgggctgtacggtctcatatcacaaccaacctaccgtgttagagctgacgcagcctgacatcgcgaatctgtacttatgtctcaatccaactttattggtcagctctggttaggtgaactggacttggtctgtgggccaaagtttgcccactcctcaacccttctatttttttccacccaagacagggtttctctgtgtaacccaagctgtcttggaactttctctgtagaccaggctggccttgaactcagagatccgtctgcctctgcctatagagtgctgagattaaaggcgtgtgcctccatcgcccagccatgccagcctctctcctgacagatttcaggatggttaagactgtctgctcttagaactttctggtagtgatccgtgctggctgataggagagccattcaaggagcatgggttgcttagggcacaggctttcgccagactgtccgggtgtgaattcttcagcagcagcagcccttttgggagattgacaaaagtggatgggctaaggctgggtttcccgttacacggagatgatagcatctaccttagctgttaagggattacatgaattagagtatgcgacatatctaggaaagcactggcacagtagaaatattagccgttattaatgttttcttatcgtcaagcagttgaaaatgatttctgggttccgtgtgggtcacagggactcagcctcagactccagagcactgtatctgttgaagggcaaaagtaacaaagccccccagtttccctaagtgatagctgcaactgtttcacatgaagctgccctgtgctccatcttcctcaggcgacttgcagagcacttgtggacacgactaatctcagggccagctggccagaccccaacctaagttggtctcatgagtccccacagcccagctctctaccctgacttctcttgtgggtaccacaggaattcttgcttttaagaccggggaattggtttgcatttgtgatgtttgaagatgatagacagacaacatcctatgtgttttctaaaatggctcttggcttttctcctttgttaccaaagtaccctgcttgtgttggctgatggggagacagtattccagagtattgaagtggctaattcaatgataaatggttaaggatagaaccatttgaatgtgcttacagtcacatttcttgcctcccagcctaacctgtcaaccttttttctacctctaagaactaaattcctgaagcattgtttagcacgtagtcggtatttcctggggggattcagatgctgtcctggtagaggagctgggctagggtttgctcactgctgcccagccctgggctaattgtctcacttctctttcctctctctgctccttccagaactcagtgcctctgacgacagctccctgtctgatgggctgctcctggaggaaggtgagatggacagtttggggacttggtcaagatggtgcgggatttgtagtttcctagtgaggactctcagcgggaccggaaggtttagggtactagccaagggtctttctgagctctgatgtcagtatctgtccaggcacatccccattgagggttgaggatgagctaagctcctctttcaatggatccttctgatgaggaagggaaaggtgagctctagcctggcctgggtgtctctccttcactcagaggctatatttgggtggagccagttagagccaaggaatggtctacttaagatccttgccatggctgtaaagaaggcagagttggggaagtacaagactgtggattaaggaccttgttttaaaacactaagaatgtcaggtcaaagtggactaagaaggcaattgcaggcgtggccagggtgtgcccaggccaataaggaaataggacatttaggtgaggcaggaacaagaaaactagttagctgcagaaaggcatcataagcaaatgctagaaagtggggtagagagagtcagagaggaagcaggtgtaaattaaaataggactgggagggcgggagtccttaggaagaaaacagcttttcttatctgggactgggactatggcctggggcaggaggtcaaggctttgagggagcaagcaagggctgtagagggacttgctgagccggtttccccagcctctgccttctctacccctgcagaagactcccaagcgccaaaacctcccccagagtcaccggcaccaccttcgcggcctctcccaccccagagccttgagggcctacagccaacaggacctgagtctggcggccaggaacgggctcccatccaaaacagtccctggaaggagaccagcctggaccacccctatgagaagcccaggaagtcttctgagctcagtagcgagtccaggtcagactggggaggaagggagtaggggacagtccagaacagagggaaagtgacacagtggtctagactggggccatggatgggggcaatgtgcgggcgatcacactccttagctatgtgatgctagaggtgtgttgggtgctggcgctttgcactgttcccttcggggctccctgtctcgagtctttaaataaagacgttgctgtcactgacttaccttcgacccctttgcagcagcccggccaccactcctcaggaccagcccaacccttccagcctgtgggtgctggatgctgcctcttaccacgtggtccccatccgaaatgttcccggccagcgtcagggccgcaccagtgccccagccacccctgagatgcagggcaggaggggccagtcacagtctctgaggtaagatggctaccccagaggtgcagggaacaccccattcccgttccaaggtacagctgagacacccggggtgacacatggctagtgccttgggtactcttttgcatccctcactggggtgcctctccaaagaggctgctctttagcagaacccagagcagctcatgcttgaaggaaggcagcatttgaggtttccagccatgctgtttccttgcactgatagataatagtttatggttggtctctaacaatgcatagtgctctttttccgttgatgtacagttggttctcattactcatggtagttatggtctgtaacattgctgtaaacatacaatctcctatagcagtggttctcaacctgtgggtcacgattcctttgggggagggagcctaatgaccatttcacaggggttgcattagaccatcgaaaaccacagatatttatattacaagtaataatagtggcaaaattatggttatgaagtagcaacaaaaatgatcttgcagttagggggtcactagaatatgaggaactgtattaaagggtcgcagcattaggaaggtttagagccactgacctataaggaaatacaggtcttggggacagtgttgattattaactttaatatatatattggcttcattatggccaaacccatgcccagtgacactgtaactcagtttgagtgaagtcagtctagcagtcttactttctctccaagtcacctcacagtggttttgtgcttagaaactgcagagagcacttcacttgtgggaccatttaaatataaagtagccaggtatggtgctcccagcactcaggtggatctcagaggagttccaggccagcctggtctacatagcgaggtccagaatattcagaactacactgagagatcctgttgcaaaacaagcaaatacataaacaataatatagtgatccgtgcccccacccccaccccgtgcactaagcaatgccaccggaagtggaaaggaagtgtgggtgacatcttgccatggaccagggtcctgtgctagaagtgaactggtaaccagcattcatttctgtctgctacccgactgcagatgtgctgtgaccagctacctcgtcctcctgcctccaagccttcctacataatggaccgcaccttagactgcaccttagactgtgaaccgaagcaaaaccaaccttccttcctttcttccttccttccttccttccttccttccttccttccttccttccttccttccttaaggaagcccttgtcaggtgtgacatatgaagtaagatgaaggcacatgaacgtgtttgtatttagggctgtttcattgtggggcacagctgggctggaacccagggccttacgaatgatgaagaagctctctgcaggctcccaactaactgttgttgtttgtttgtaggtaggggttcccgatgtagtctagcctggcctagcctggccttcaccatcctcctgccccagcctccctggtgtggtacctttgtaccaccataccaaacacagcacttggtccttgttcagtctctgctggagacctgtgcttagagcaggtccgaattctcggctgcatcaagtgaccatgaatgatccttatcattcagtgtgggaaagacacctgacaagaacaacttaaggaagattttgcttcggctcaccgtctgaggtgcggtctatcatgtagggaaggcttggaggcaggcggatgaggcagctggtcacagcgcatctgcacatctgcagtcaggaggcagagagaagtgaaagctgctttccagttcactctcagcccttctaactcagtccaggaccttggcccatgggaaggtgccacccatatttagggagggtcttctcgcttcccatgaccccatatagaaacccctcacaggcatatccagaggtctgtgtcataggtggtcctagagcctatcaaactgacaagagtatagccattgcaaaacacaatgtatatgaattttggacttagcaagtcaagtttagcatgtgggtgggctggcatactaaacctaggaataatgaaagccactgtatgcttcttttcaagccacctggtaattgttttagtcagtgtggtctgagaggcagcatcagccatagtgacctggtaccaccaaagccttatccggtagcattgaacagctcagaagtaaaacaacctatttttatattttacctatttaccaagatcattttgtaaacaacgcgtgcaaaatccttaaaaggcaacccagccccatgcccagaatataagtgaagcaggctttaaatttcagctctccctcatcctgcgctgcaagcacctgccctttggaacacacgaaagcttttcacatttaagttaggtgcttgacgatgtctaaccactaagagtctgagtaaatgctattaacatactggaccctagctgtctggaaacatgacatggatggagcagaatgttggctcttcctatcggtggattgaaatcgactgagaaaccaaaatacttaaaaaaaaaaaaaatcaacatatcagggctggagtgatggctcagcaattaagagagctgtctgcttttctggaggaccgtggttcaattctcagcacccacatggcacctcacaactgtctgtaactccagtccccggggatctgacaccctcacacagaagctcatgcagacaaaataccaatgcatataagataaaaataaattgttaaaaaaatcaacttatgcatccaacatgtaccaattctatttgcagggctgggattgaaccaaaacttcattcatgttaagcaaatattcttacatctgagccacattctccacccttcagaatcgtattgtcattcctaagtagtacaatatgtgagggagttacatggtatttacactgtattaggagttttaagtattccagagattacagtctacagggcgtattgtatttaatatttccctattttgtgtgacctggattttgtgactcagggatcaacttatcctgatgtagaaaagtctggaagggaacaagagcagtatagcaatatggcaccaagggagggaatgccctacctctgcgtattagaacaagactgggttgtgtgctctgcggaggactgacctaagcaagaactagtacatgctcattgccctggcctagggacagaacactggcatccaaggtcataattcatcactccgatatggcccctccccaactcaatgctttcccatcttcctcttcagggtggactccttccgagcaggcgcggagggccgaggtcgcagtgcctttccccgccgccgccccactcattacacagtgacagtgccagactcctgcttcacacccggcaagcccccactgccacaccctgcctgccattcctgctctgaagacagtggctctgatgtctccagcatctcccatcccacctcacctggcagcagcagtccagacatctcctttctgaggcccctctgtctccctgagccacctcgccaccgtggggcctggggcccagcctgtggcagagagctggcccctcattactctaaacttctgctacccgctggatacttcccaacggggcgctatgtgatggtggccgagggccacctgccgccgggcgagtgggagctgtgtcgtgcagccgtgggtgctgcctatgacgaggaaggtgcacccctgcgttaccagcgactggtaccctcccacagccgcattgtgcgcacaccctcactaaaggacagtcctgcgggccggggactcagcaaggcagcagtctcggaggagctcaagtggtggcatgaacgcgcacgtctccggagcagccgcccccactcgctcgaccgccaaggggcgttccgtgttaggagtctgcctcctgggagggagagcttcgggcgggcctcaggacccaggacacaggtacagcttcccgtggggggaagaaattagaccagcaactactggccgagtaatcaccagttaggaaaattaggccaaaagaggagaatatttcctcttggctttggaaggcacttctgccttccctgggggtgcctcttaattgtgcctactgtgtttagtgtctagcgcaagagtgcataccaatgtgccctggtagagattgtcctcacagatagctcagagattccccctaatggcttcacggatgatccacaaaccagataaacttcctcagaaccgaattgcaacccaaattaacccttggaatttactgactctagggcccaggggcaaagggagaatctggaaaatgggtttatagaaaataactcactgtcgccaggctgggaaggagatggtctcacagttgacagctagagactaccaggttctgattctaactctatggtcctgtaggttacttaacgcttaggcttttgtttccccctctaaaagatgggcgtagtaaatgacctctctcattcatgggttggatcagaggctgaaatggttaaagcaatatatgagagtcctagatcagcaatagctctatcacgggggctcccagagggtggtgtctgtgtgtgtgtgtgtgtgtgtgtctgtgtgtgtgtgtgtgtgtgtgtgtgtgtgtgcgtgctaggttgtatcggaagtaagaaggattctgagcactctgacttcgggtaggggtgcagccttggtttctgtaagccccatttcttcatcctggaattgaggctagccggcatgaatcctttctttattctctcatccggattcagaaggctatgcaggggacagactctagaagttaccaacaagctgcttctttgagaccccagattcccagcagcccagctgcatcattccccacccccacccctgatctttgggctgttgcagctgccatctctggctgggcagcgccctggcccagtcccaggctatacaccctctagctgacgtgcctatcccttcctgcgagcttagacctgcctttggtctaggcttggctcatcccaacctgtcagacagggacggtgatgagacatgagcccgggaaaggtggagaagaaggtcagggtgaccgtcataccccaaaggacctggatcaggggtggtacctggggggcatcattcctggggagggcaggagcagagcaccagggcttcactatcgatgatggtctgtgcctttaagcaaagagaacgatgtggctgagcttgctgcactgacctttctacccagtttgctcatccgcctctcctctctccctgcctgtgacaggtgccccccgtgtacgtactccggaggtcgacggacggggccccagtgcaagtctttgtgcctgagaacggagagattatcagccaagtgtaactcttctgaacgccttgcctcgtgcgggaaaagacttttctattggagctggggtcgaggaccccctcacccttaagtgcttctttcatctcccctcccctcatcgcaggccgatgatgcagagctgagacctttcggtttttttacatgtgtttcccagaagtcctgacctgaggatttatatctgtgatttgtcttattctttaataacatgattatgctttatcccccagagtctggccttttggactaatgtcgagctggactaatcgacagcatttgtctccttatgtaggacaagtggcatagagggccccttgagacgtcccatatgctctgggccctctttctgagatacctgttgcttcttaaggctggaggccggatgtgggactccctcaacagggactcttcccttgtttcccagatgctgggcagaactctcctctccccttcagggcacaggcatttctgtcatggtgttcttcccataccctacagtagtcccaacctccacttgccatattgtatggcttctgagccccttccccagtgcatagatgccccccccccaacccagtgtattctctggatccctaagtgccttagatcctgagccacagagctgagagacttctgagtgctagtgcctccccacacctgagcatccttcacattaattaacttattggtcttacctaacagctatctcgtgtggttgcaccgtggcggtgccctccgttacagggcaaccttgtgccaaatacttcaataaaatctgattggcccagctgaggatgaagg

SEQ ID NO: 209 - DNA, 3013 bp, Mus Musculus
gaggctgcgtgaatgcgggagacagggagcagcgtcgcccctcgcgctgttgctgccgcaggatgcacacttgggctggcattgccccaacccaacgtgaggccccgccccgtctctgggttcagaatctcgaatcccttctagcatcttcccctctcttcactgggcctttggtatgccccaggggacagatgtcttgggatctttaacatttgggatgctgcaaatgccgaagttaaatgaaatacctccggggaggggaggcccgggggagccttggggagagggaagatgggcgggaccaacaggtcctgaagctgcgcgaccggcgcggggggcgcgggggcaggcgcgaggcgccagagctcggtgggacagctgggaacactccagactacctacacatcctggcccaggctgggaccagtgcagcccctccttcctctgtgccccctcttcccagaaactcatcatggagagtaaggatgaagtcagtgactccgacagcggcatcatcctgcagtctggcccggacagccctgtctctccaatgaaagagctgaccaatgcagtacgcaagcagcagagggctctggaagcgaggctggaggcctgcctggaggagctgcgcagactctgcctgagggaggcggagctgactgggactttgccggcagagtatccccttaagcctggtgagaaggcccccaaggtccggcgcaggatcggagcagcgtacaagctggatgagtgggccctccacagagaggaccccctgagcagcctagagcgccagttggctctgcagcttcagatcaccgaggcggctcgaaggctgtgtgcagaggagaacctcagcagacaggcacgcaggcagcggaagcacgctgcgctgcaggaggagaagaagctgcgggaccttcagcgttgcctgggtgatcggcggcggaacagtgagccccctcctaccactgtgccctccctgggcagagaactcagtgcctctgacgacagctccctgtctgatgggctgctcctggaggaagaagactcccaagcgccaaaacctcccccagagtcaccggcaccaccttcgcggcctctcccaccccagagccttgagggcctacagccaacaggacctgagtctggcggccaggaacgggctcccatccaaaacagtccctggaaggagaccagcctggaccacccctatgagaagcccaggaagtcttctgagctcagtagcgagtccagcagcccggccaccactcctcaggaccagcccaacccttccagcctgtgggtgctggatgctgcctcttaccacgtggtccccatccgaaatgttcccggccagcgtcagggccgcaccagtgccccagccacccctgagatgcagggcaggaggggccagtcacagtctctgagggtggactccttccgagcaggcgcggagggccgaggtcgcagtgcctttccccgccgccgccccactcattacacagtgacagtgccagactcctgcttcacacccggcaagcccccactgccacaccctgcctgccattcctgctctgaagacagtggctctgatgtctccagcatctcccatcccacctcacctggcagcagcagtccagacatctcctttctgaggcccctctgtctccctgagccacctcgccaccgtggggcctggggcccagcctgtggcagagagctggcccctcattactctaaacttctgctacccgctggatacttcccaacggggcgctatgtgatggtggccgagggccacctgccgccgggcgagtgggagctgtgtcgtgcagccgtgggtgctgcctatgacgaggaaggtgcacccctgcgttaccagcgactggtaccctcccacagccgcattgtgcgcacaccctcactaaaggacagtcctgcgggccggggactcagcaaggcagcagtctcggaggagctcaagtggtggcatgaacgcgcacgtctccggagcagccgcccccactcgctcgaccgccaaggggcgttccgtgttaggagtctgcctcctgggagggagagcttcgggcgggcctcaggacccaggacacaggtgccccccgtgtacgtactccggaggtcgacggacggggccccagtgcaagtctttgtgcctgagaacggagagattatcagccaagtgtaactcttctgaacgccttgcctcgtgcgggaaaagacttttctattggagctggggtcgaggaccccctcacccttaagtgcttctttcatctcccctcccctcatcgcaggccgatgatgcagagctgagacctttcggtttttttacatgtgtttcccagaagtcctgacctgaggatttatatctgtgatttgtcttattctttaataacatgattatgctttatcccccagagtctggccttttggactaatgtcgagctggactaatcgacagcatttgtctccttatgtaggacaagtggcatagagggccccttgagacgtcccatatgctctgggccctctttctgagatacctgttgcttcttaaggctggaggccggatgtgggactccctcaacagggactcttcccttgtttcccagatgctgggcagaactctcctctccccttcagggcacaggcatttctgtcatggtgttcttcccataccctacagtagtcccaacctccacttgccatattgtatggcttctgagccccttccccagtgcatagatgccccccccccaacccagtgtattctctggatccctaagtgccttagatcctgagccacagagctgagagacttctgagtgctagtgcctccccacacctgagcatccttcacattaattaacttattggtcttacctaacagctatctcgtgtggttgcaccgtggcggtgccctccgttacagggcaaccttgtgccaaatacttcaataaaatctgattggcccagctgaggatgaagg

SEQ ID NO: 210 - protein, 677 aa, Mus Musculus
MPQGTDVLGSLTFGMLQMPKLNEIPPGRGGPGEPWGEGRWAGPTGPEAARPARGARGQARGARARWDSWEHSRLPTHPGPGWDQCSPSFLCAPSSQKLIMESKDEVSDSDSGIILQSGPDSPVSPMKELTNAVRKQQRALEARLEACLEELRRLCLREAELTGTLPAEYPLKPGEKAPKVRRRIGAAYKLDEWALHREDPLSSLERQLALQLQITEAARRLCAEENLSRQARRQRKHAALQEEKKLRDLQRCLGDRRRNSEPPPTTVPSLGRELSASDDSSLSDGLLLEEEDSQAPKPPPESPAPPSRPLPPQSLEGLQPTGPESGGQERAPIQNSPWKETSLDHPYEKPRKSSELSSESSSPATTPQDQPNPSSLWVLDAASYHVVPIRNVPGQRQGRTSAPATPEMQGRRGQSQSLRVDSFRAGAEGRGRSAFPRRRPTHYTVTVPDSCFTPGKPPLPHPACHSCSEDSGSDVSSISHPTSPGSSSPDISFLRPLCLPEPPRHRGAWGPACGRELAPHYSKLLLPAGYFPTGRYVMVAEGHLPPGEWELCRAAVGAAYDEEGAPLRYQRLVPSHSRIVRTPSLKDSPAGRGLSKAAVSEELKWWHERARLRSSRPHSLDRQGAFRVRSLPPGRESFGRASGPRTQVPPVYVLRRSTDGAPVQVFVPENGEIISQV

SEQ ID NO: 211 - DNA, 24174 bp, Homo Sapiens
atgctgcaaatgccgaagttaaatgaaatacctccggggagggcaggccgcagggaggctcggggggagggaagatggcctggacaaacaggtcctgaagctgcgaggctggagtggagggcgcaggggcaggcgggcggcgccagagctccatgggacaggtaagcgggaaaacttcggggcacccagtgcgggtgaactggggcgggggatcgggcccctgaacccacggtcttcagccttagcggagggtgccctacagggaatggggtaattttttcaaaggggcaggaattctgagttcctaccaaaaatgcacatttccagtccctcaacctttctccttcgaccttcttcgtgcctgtggatcttcctggccaggttccgggaagccagaaagcagccaaacaaaaggagcaaagtctcgggccagcctggatgtggagggcgcagtgggggaggggagcagggtggacaggacaaaggggctttttagagaaagcctagaggtctcatttcagggcgcattccaagctggcttggagttcccctgtcccagcccacttcacctttgcttagtggaggcgaacacctttcctagtgagcagggagcagacgcgagtaagaaaacagtgaaggaaccatctcctacccctcttgcctggagggtcccgggctatttcacttcttccttttttcactgttgtctctagcgctggccattgattccttaattcttgaagtaagattttagcagtgcctgagactactttgctgggggctgttggggatgtgaagatggtaggacgaggcccttgctttaaagaacttccaatctggtgttatcagaagaccctaaaagaaggaacttttttttaaaaaaaatggagagtggatggctacagcgctggggaagagttttctgactcgggacttttcctcaggaaacgaaaacactgaagaggtccagtttctcttccctggggaagggctcttgtctgcaaagatcagattccaagtactataatgttttgcaaggaaataccacttcctcaccaactggtggtctggacggcactctggggtttggggctggggcatcagtcccctgactccccggcctggctggagtggggagctgtttcagattcccagctggcctctggagtgcccacctcccccattggtattttgaattgaatgacatggccatcagagagctccaaggatggctccccggggttcttggcaggaggtttggttagccagctcccttccaaacctcagattctgcaaggttgggaaatattgagcgtgaatttgggggagcaaggtgtttttgagaattccaaaggatcaatgcaaacagtgagattgagcatctgtactaacctcccctgaagtcagagatggaggattacctgagggcagggattcttaactgggttcattggcattaggcatctgtagatggaattcagaggatgtgtaaactaggtgaggcaaaaaaagatatcattgtttttcaccaacctttaacagattttaacatcacctttagttatgaagacaacaaatcacagtagcattggcagtacctgtgactttgccattaatagaattcatagtttcatatcacactgcagtcacagcagtcttgaaatgttgtttacactcagcccttgtgtgaaattacccactgctagaccctgcttaatgttaataaagaagcatatatattgctatgtttttatatttttagaactttatttcatataattgacttttttagtgatcttcttaattttattttatgctcaagaaatgtgaactgtgagccaattcacagctggtagaaacttccaccaacccccacctggagctggagatgggcaaggtggaggaagggccgcttatgcccagagtcaacccctctctgtttgactttgtaagaaagtgccaagcctctatggggagggacggtgtgtcacggaggactggggaagggcagggctgcaggctctttgggagacccagagaacaagctcccaatggggcggggggaggaagaactgtcccctcttagggcccctcagcctcagcctgggcagaaaatgaggtggtcagcctggagcactctggggctagcattgtttggaaaaagggtgtgtacaggaatgtgaaggtgtgctgggtgtgtgtaccggagcagtgggggatgctgggggactccagccccatgagttccgctccacaggagatgcctggtgaaagcaaacttcctctgtcatccctgcacttgggggtagggagtggggacaggactttttaggggctgggggaggggaagcaatccagacatgtattgaggcactggaatctgggtcgggggaatggtgggaagatcagagagtggggggaaagggaggtggtaagatgaagacttgaggggtgcagcctgctggggacaggccaggcaacagtcagcgttagctctgcttccgccttgaaataggctagattccagtttcccatttgcttgggggtcggtgggatgggagatcttgaggcttattttttataggaaataagttccattttggtctctggctccttgcatttggggagtggacttagggtctggggtcacagtggacctcctgtggagtaggaaacaggacttgggctcaggtcagtgcctgtcagtgccccatgaacatgcgttgctgggggatggatgtaaataatcaacagagaagtgatggcctcgatacccttgggggacaatgtctgggataaaaagaacagcctgatcctctctctctaggattctagaacttctgcatattggaattccagctgccttgcctgaggttttaaaatcctcactcgggagagataaaacccaggccttggtcttcatttccatatgtggggaagagcagtgacccatccctgtcagtttgtaaatgtcctgcttgttttttccatggacagtggacatttcaccttgcttccggggtgcttaacaggcctcaatttctggaaagagaaactgaggtcaaaggaaggcagggagagccagggtcaggacaggagggcatgcaggtacctcacagctcagaatgttgtactagggtctcttgaggccatgaagacatgactcttgttgttgtcttctttggggattcctccatgggagcccctttttccctgctaccctcctgccccccggaagtgcagaggcccaggagctgcctgctggcaccagttgcacgggattagttcagggaaggacttgctcacctgctcctcccctctgactcaagtcataacaagtaacctggttcccctggcccggcagcctgggagggacggcaaggtaggcaggtgagccgagacggacggacggccagcagctccgtcagctggagagagagcacaggcctgtggcttgggagaccctgaggcgacatgtgagggccctgagccccctgactggaagcaggggctgtttttcaactcctggactaaagcccagaagcaggtgagggcgggggaggtggaatgggtctttggggctgagagcaggctggcctgggagtggaggagcccaagcagtggccatcacccccctccgacccccacccccgccagcctatgtctggtgtgtagggatgacagaggggtgctggtgggcttggacgggagcctgttcttgtggttgcctaggccttagtttccaccagagggagagcaagcagagatgagctgggacaggcaggcctgagacctggctttgggggacacacttgggatagaggaggatcccccatggcccggcctgagggaaggtgctctggagtttccctccctccctctgtgccccttctggtctcctctgcctttttctggggacattgttcagccgggtgggctgctttttagggcccagtactggagcttgaagaggcccaggagggatccctgtgttagggagggggtggggatgttacctgaactgcctttatctaaaagcaatgccttagacacttaagactcatagcctcctgggtgggggtggtgccctcgctctcacctgttgactctggggcaggttccctacagctgtggagggcggcctcggcagaggcagatgtgagggtccgctatgtggctgtacgggtttccttcttggcctgacattgaccaagaggtcgagattcagaccggggacctggaaaggctttagacactgtgcagtctttattgtgcacaggaggaaaggaagccccgggaggcctggtgacttccccaaggtagtacagaccgcagcagaaccaagccttgagcccacagccaggggctctgggcatctgacgctgttctctttgctctacttggggcagcaagtcatcccagagaggacccagcatcaggctgggaccactgggaagatcagtgcctcccctttgatgctggcagtcagagactgggctgagctgggagaaggggaagctggcggagacgggaggcgtgctaaggtacccctctgtccctgtaagtccccactcctctgcaacagtctcagagcccctgagaagcaggggctgagttggcccaactttccaaggcaactacttagtggttaataattaattagcaagcgtgactaattaatggcttcccctcccacattacttcctcctctgtgcaaagcagacacactcagcatgctagctgagaccaccttgcttcctacctctggctgcaccctgctcttggcttctggggagggtgggaggatggctagggtgggtgggaaggggtgggggtgagctgcctgctcctctgtcctgttcttatctctacgagggatagagtttgggacagatggacagtgcagagctaatagtcatcctaagtatcctgcggggtggggttccagaatatatggccaatctttcagaactttggcatgtttgcaaaggcctcccataaagttaaaaaaaataattctcccatgcattctctagacttccttgaataattgaaattccaaagtgcaaggtacatgttgctttcagggctttgtgtttgattgttgctgcctgtggttgctgtgttgtttatgtaggtctataaaagttcttgatcgtcctgctcttatcatcttgatgggtggagaggtatcaccagggacctggctgacagcagtcccctctccctgttggccttgctttgttaccagctttcccaaggccgacttttctgtcgtgttggctgcctgaggaggggtggagctcacctcccccaccctgcggccccgcgctctgaggaggcaggataggctccagacagaaactcggaaggacttttggactcttgctcaatgggctgactcagtgaggaggtggctgagctctctttccagacccaaccacctgcatgggctccgcccacccctcccacccctgctgcagccagcagctgccaggccctggccagctgggaccccaaccaggggtgtgggttggtgaggagggagagggggtgggcacaggtgttatctgggtgactggtccctagctgagccgacacaatgggatggcacctgtaccacccaagtgttctccaccccgaagcaggcagaggagcaggtgatctcctttctgtccttgcacagcttctgctctagtcactgcttgcccctctcctgtcaactcttggcaaccctgatagacacagccctgggtctcccctggctgtggggtgtaggggatctaggctgattccccttcagtggtctcccaggagtaattgatggcttgaaagttgtttgagggctttgggacagctctctggcatacagtggctgcacatatctgcagatgatgtgaagttcagagtccagggcgccaattcagagagtgggcgtcctggacttcggaggccccagaccagggccttggccatgtgcctgcccacttcttgaagtgtcctcagccactggggcgtaggacatgcctcacacctcctgggttcttgggttgaggatagctgtgtcccataaagatgtcttccccttcctcctttcttttttttttggagacggggtctctctgttgtccaggctggagtgcaatggcgtgaacatggctcactgcagccttgacttctccaggctcaggcaatcctcctgcctcagcctcctgagtagctgggactacaggtgcacaccactatgcccggctaagtttcattttggagagatggggtctaagttgtccaggctggtcttgaactcctgggctcaagctatccttctgccttggtctccagaaatgctgggattacaggcgtgagccaccatgctgggcttccttcctcctttctttgttatcccatcccattttttgtccccttcctttttatcctgtctctgctcttttccttcttgcccttctccccagtcgagcggttcttgtggctaccacagctgtcgacccccttaggcctagaggactttggcccagaggggagttaggctgggcccctgagagcccactgagaacagggtttgctggtgaggcccacagccccttctctaggtcagcacccccagtgccagaatctcctgccccagatggttcctgaagcacagtcctcccttccactcccctgctctcaagcatctattcagctttttgtaaccaagatggttcatatctagcttttttgttattgttctcttttctctttaaagctggggaagctccaggctacctacacaacctggcccaggctggtcacggtgtcccccctccctgctctgtgccctctccttccagaaatccaccatggagagtaaggatgaggtcagcgacaccgacagtggcatcatcctgcagtctggtgagtgttcagggaaatccccctgccctagtccctagtccctggtccctggtccctggccctgactcctgagtcctgagccctcaggcactagggctggctgggctgagactcccaagggctgagaggaaggggagggagaggcctctgctgggaggagggggaggttctggaagggctggagcctcagggacatgtggagttttcctccctggagaaaactggcttggagttttggttctatctggaagagggatctgcaatgttcaactttagccccagctgagaagttgaaaaatctcaggcaggcacagtggctcatgcctgtaatcccagcactttgggaggccaaggtgggcggatcacaaggtcaggagatcgagaccatcctggctaccacatagtcccagctatgtgggaggctgaggcagaagaatcgtttgaacctgggaggcggaggttgcagtgagccgagatcgcggcattgcactccagcctgggcgacagggcaagactccgtctcaaaaaaaatatatcatctggccaatgtgaaggtcttgcctctctgtttggccagacctgtgggcctagtctggcctagtcttgacagaggacaagaaagaagaggcttatgtgtgtgtgcaagagagaggggtagtggggagagggagagagagagacaggaagaagaaggagaaggaaaagaggaagaagaagggaggaggagtggggggaggactgcaccggcagaactccctcccctgcactcccccaccataggtcacctggtgggacgaccctcccttctgagttgtaacatttgtgcagccaagagacgtggtgttttgtggctgtgacacaggccacagcagccagcctgcaatttgtgggcaggcatgagatgtgtgtgtgtgtgtgcatgtgtgtgcatgtgcattcccctaggggtggtcaataagtaacggaggaggcttccatcttcagcctccctgagcatgtgccccccaacccttgcaggccccgacagcccggtctccccaatgaaggagctgacccatgcagtgcacaagcagcagagggccctggaagcgaggctggaggcctgcctggaggagctgaggagactctgccttcgggaagcggtgaggccccagccagcacacacaagcatcgggttcatctcaggagctgtggagccacgtgtggggatgcgggagctggggagagggagccccattcttgagggaattctggacatcaggctgggggctggggcccagagtccccatgatgcagtgtttgaccttgtgctggatggagaagagtcagacccaggcaggggcccaggcacagagaacaaagttcatcaggggctgcagagggactgcacagacataagtgcatatgagtgctgtaacccgggtcggtgtagctctggaggaagtgatcagaaagaggtctgaagggaaaggggaggagtgcagagtgggtctgaagacaggagagacagtgtggaggatgggatgaggtggggtggagggtggtcccaccagggcttctatggaaggcaggcacatgcagtgcaggggccagtgagccaagtctgggcaggtggagaggacctggctggtctctgcttcctccccaggagctgacgggcaccttgccagcggagtatcccctcaaaccaggggaaaaggcccccaaggttcgccgcaggatcggagcggcttacaaactggatgactgggccttgcacagagaggtgaggaacctcaggaagctgccagtacccctcgatccccaaagctgatcactgagacgccacacctcagctcagtaccctggcaggttcccttccaccctttcacacccagtgagggtgcttggctgcctgttggtgagagacaccatgaatatgtagcccaaatggctgtggagaaggggcgccactaaggaaccgagagctgggagctcaagggaggacactgggtttgaccccattgggcagaagatcagttaagagcaccagccaccaacccagcgggcaatagcctgctcagacaggttactctggcccctagggctgtcctcctttctcaggaggaggtgggggcagtcaggccctgggtgcccttcccctgtggcgtcaatggcagcagtttcccatgggccagcctgccccaccctttggggtcaggagggaaagtgtcccacttgggttcccaccctgcccggttcagcaggtgggctggtgggtgggtgcccatgccagcttttcaggctgacaagtttgcttttcggctcctcccactccttcaccctctgctccacgtccgtccattggtgctgctgtctgcctctcttctgtcctcagggcttaggactgggacctagagcactgtgtcagggctgctgtccaccctctgggcccccaatctccctgcctctctctagcctcactcctgccccctctctcaggaccccctaagcagcctggagcgccagctggccctgcagctgcagatcacagaggcagcccgtcggctgtgcctggaggagaacctcagcaggcaggctcggcggcagcggaagcactccatgctgcaggaggagaagaagctgcaggagctccagcgctgcctggtcgagcggcggcgcaatagcgagccacctccggctgctgctctccccctgggccgaggtgagccggctgccctgaggggggccatgctccttaaatgagcttttgagggatggtgggcgcacagccccgtgccactgcctttgcatttggctccagctgggtaaagctgattcttgggttcagctccaccccatcctgattctctccaactccagcaaggcttccccatcctgtgaggtcttcttctccgtctccttagaaaacaccctactctctccttccgtatcctcctcaaaatacactaccttcaagagacttcctacacagagatatttctcagctgaccctgagctgaatccaaggtgtattcaactgggtagcccaggctggccccgctgccctccaggcccacagggtgatggcatctctgggtcagggtagtgtgaggctcccgtgagcccgaggctctgagttgatgtgtagtcccctggcctgagttaggcagcaaagggtttgacgattgctatgtgttactgatcactgaattgtttcaggggcccacagctacttaggagatgttcaggttgaaatccagcaggactggtgccacaccccacagccccttaagtatctacaaccaccctggtcaagggtgggatccttccatgtctgttctctgccctccttgtgtctgtagttcaatccctgagctccttggcccagagactagtggccgtgggggcacctagtgagttgttgatgcccaggtgctgccacatcacatcagtgtgtccaccacaggttagcttccaacaggtggttctgagcccttaggtgtgactgttttcctttgtcctgacccaaggccagcctgtcaggtcaggacttgcatctctccattccaaaccccaccgcagcaggcccatgactcagctctgccccccgtctctcacatgggacccagacctccctggctgcctcagagggaaccgggagggaatgaggccgtggccctgcaaaaaaaaatccagaattggattcagaggtctcggccttcattcacattctcaggctcccatccctgcatatcgtgttggctttttgccaagactactcctcagcctgggagcagtcatggggaagctggaaagcccttgctagtccctgtgccctgcagcctatgcctcaggcagggagttatctcagcacaggtctcagaagtccctgctcctatccatggcttttaatttagggtagaaagtgcatgaccagacaccacccaggtcacctcccgcagccaagagtaggtgataaaggaggaggtgcctccatgtgacagttaacccagtaaactcagaagacagtggggctgacccagggaaaatggccagacctctgtccggttccagtggttctggcttggccgcagaacaacactcccagtctctgaggctctaatggaagacaagttctacaaccttactccactctcaacagggatcccaggacttgacagcaaccttgaaaggtagctgctgaattggacatggaagcccctaagggccaacttgctctgtgcctgcagggagaggtcagggtggtgagatatgcccgttggttgcagcgcctcctgctccccggtccagcctcacactgctcagcagcctcccctgcccaccggggctgccattgctgggagcttctgcccatgatgggtggcaggggagtgtcaccctgatgctgccattgtgacccataatgcttcttgttgggagtcgggagcaggccaggactggcctggggctctgtggaaggcaggaggatgaggttctgaaaccttggagccctcagtacaggtgaagacagagctgtggagaggagacaactggtgtagttgctgactttcccacatcaggaatcaagatcccactggccaacttcaggccctgggatctaaagtcctgttgtgagagcacagaagggatcagttctagacaagtaatttctgttttgtggctcctctgcccagccgagccctcctagaaaggaggaagtaaagcagaattattagtagctgaggtgttttgaattaaaaagggaaggccggacactgtggctcatgcctgtaatcccaatacttttggaagccaaggtgggcggatcatgaggttaggagttcaagaccagcctggccaacatagtgaaaccccatctctactaaaaatacaaaaattagccagacatggtggtgcacgtctgtagtcccagctactcgggaggctgagccaggagaatcccttgaacctgggaggtggagcccaggatcaagggagccgagatcgtgccactgcactccagcctggcaacagagtgagactttgtctcaaaaacaaaaaacaaaacaaaacaaaaaaacaggaggccaggtgcagtggctcacacctgtaatcccagcactttgggaggccgaggcgggtggatcacttgaggtcgggagttcaagaccagtctgaccaacatggagaaaccccatctctactaaaaatacaaaattagccaggcatggtggcgcatgcctgtaatcccagctactcgggaggctaaggcaggataatcacttgaacccaggaggcggaggttgcggtgagccgagattgcaccattgcactccagcctggtgacaagagcgaaactctgtctcaaaaaaaaaaaaaaaaaaaaagggaaaaaagcaaacaacccaaaaaccgaaataaaaaaccaccctgcccccttgggctccatacaagggtaatttagtttgggaaagtaactgctaggtgagagtcatcagccatactttgcagtggcagggagcagtcaggtgttgagctcatttactagagtgaaccgcatgagggccacccagcacccacctgtgcaatgtaataggcactctgggtgcatctgttgatcaacaacaccagccattagccacatcctcataacattttttttttttttttgagacggagtcttgctctctcatccaggctggagtgcagtggagccatctcagctcactgcaacctccacctaccgggtttaagcgattctcctgcctcagcctcctgagtagctgggactgcagatgcgtgctgccacgcccagctaatttttgtatttttagtagagatggggtttcaccaaattgtccaagctagtctcgaactcctgacctcaagggatcctcccgccttggcctcccaagtggtgggattacaggcgtgagccactgcgcctggccgctcatagcatttctgagatggtggaagtgttctgtatctgtgctgtccaatacagtagccactcgctgcatgtggctatggagcatttgaactgtgcctagtgtgactgaggaactgactttatttagttttaatgaaaatagccacatgcggctagtggcaactgtgttggacagcatagccttgggggaagctcagcatttgtgagtaaaatctccaccgttacccctctgtctggggtgtcctgcgatgctgctgcggggcaggggaacgctgagctagggcagggttgggacagttgctgagatagtgagcagctctcagaaacctgaatctttttttttttttttccaatctttttagagacagggtcttgttctgttgctcaggctggagtgcagtagtgtgatcatacctcactgcagccttgaactcctgggctcaagtgatcttccttcctcagcctctagtagctgggactacagtcatgtgccaccacacccagcaaattaaaacaaaacaaaacaaaaaaactattttagagatgggatcttgctatattgcccaggctggtctcaaactcctggtcttaagcaatcctcctgcctcagcctctggagtaactaagattataggtgtgcctggcccaatgaaaatctttattcctaaggtttttataaaagatcaaaggcaggagaccagaattcagtaagagggggtctctttaattgaaccctaaagcaaaggctacttgtgagccaagcaaagcatgggctggctggctactcaggagtcaagcccagctcctggtaccgtatgtcctagaaatctactgcctgctctgggtaaagattttttcattaaattgcggagcaggctgagcatgttggctcaagcttgtaatcccagcactttgggaggccaaggcaggaggatctcttgggcccaggagtatgagacctgcctggaccacacagggagaccctgtctctacaaataactaaaataaaaaaattggataggcatggttgtggacacctatagtcccagctactcaggagtctgaggtgggagattgattgagctcaggaggtcaaggctgcagtgagctgtgatcgggccactgcactccagcctaggcaacattgtaacaacccatctttaaaaagatgggttaaacctttgtggagcaaaggttaacaaacttttccataaagagccagacagtacatattttagtctttgtaggctctttggtctttatcacaactgttcaactctgctacttcagtgctaaaacagccagacattacataaacaaattcatagccgtgttccaataaacatttatttacaaaagcagctattgaactggatttgacccctgggccatagtttgctaacctctgttgtaagggatttcaagatggttggaactttttactttttttgaaacttcctgggcaatgcccatgcatttgagatgcaagctcacaggggagagcccataaagggttgtggttaagagcagactccagtcagactgtctgggtgtgaattctgactcaaccacctttgttgaatgtacaacctaaaccacgttactcaactcctctgagacgtggtttcctcaactgtcacttgcaggtgataatatctaccttacgtggttgttatgagaattacctgaattaatatatataaagtgctgtatttagaaatgtattggcacagtagaaacattagcaattattactttttcctcatcttcattctcaaacacagttgaaaatgtttcgtgagttccatccaggtcactttaggcttattctcaagatctgaaggcctggccgggcgtggtggctcacgcctgtgatcccagcactttgggaagccgaggtgggtggatcacctgaggtcaggagttcaagaccagcctggccaacctggcaaaaccccgtctctactaaaaatacaaaaattagccaggcatagtggtgtgtgcctgtaatcccagctactcgggaggctgaggcaggagaatcgcttgaacctgggaggtggaggttgcagtgagtcgagatcacaccactgctctccagcctgggtaagagaatgagactccatctcaaaaaaaaaaaaaaaaaaaatctgaaggcttaagtttcttcaaaagcaatagcacaaatgagttccctctgatttcttaggtaaaaagtgctgctataccatgaagtaaagtcacactgaatttccttcaggtgacttgccagatcaccaactgaagaaacttccctggggccagctggccagaccttatcttaaattcaaattcctaccttgcgttcctcttgttgttggtaacacaggaggtctcacattgggatctttgaattgtgtttgtgatgtgagatgattatacaaaagttagagtgaaattcccttttttttatttgagacagggtctcactctgttgcccaggctggagtgcggtggtgtgatcacggctcactgcagcctcgacctcccaggctcaagtgatcttcccatctcaggttcccaagtagctgggactacaggcatgcaccatcatgcctggctaattttcgtattttttgtagagaccagatttcaccatcttgcccaggtgggtcttgaactcctgggcttaagccatctgctgccttggcctcctaaaatgctgggattacaggcatgaaccaccgcgcctggccatgaaattctttttatcctaagggccttccaaaatgaccctttgtctttcctttccactaccaagaagccctgccagaggacaccctttttctttttttttgacaggtggggaaactgaggtctagagcattgaaatggtttattcaaggttgcatagctagtatcagagtcaggattaaaatcaggtttcctgtctcctagctctgccttctatttttttctacttccatgtagtaagtttacagccaggccaggcacagtggctcatgcctataatcccagcactttgggaggccaaggtgggatgatcacttgagcctaggagttcaagatcagcctgggcaagacagcaagacctcttctctacaaaaaaaataaaataatttagctgggtgtgctggcatgcccctgtggtctcagctacttgtgaggctgaggtgggaggatcccttgagcctgggaggtcaaggctgcagtgagccatgatcacaccactgcactccagcctgggccacagggtaagaccctgtctcttaaaaaaaaaaaaaatcactcccaatgtgtatttagcacacagagggtatttcctcataactgatgctgtcctgggggagtgatcaggcctgagctgctcagcactgctggttactcatatctgtttgttcatttcttcacttccttctcttctctcccctttgtctttcgcagagctcagtgcctctgatgacagctccctgtcagatgggctcctcctggaggaaggtgagaaggacgtttgggggactattgtcaaggctggactcctactgcaagaccatggggtttgggcagtttgctggtgtggaatttaagtgggagtgaaggctagggtgccaggcttagggtttccgcttggacttcatgtcaatttccgcatgtccttgcacatgctcagttgaagatggggaatgtgcgatcatctcccattctggaagctcattatttttacagggaaaggaaaggtgaactccaagagagctgatcaaccccagatgtccctccttcacccttgggtgtgatttcaagatgcaccagtcagagccaaagagcaatctgcccacaatcattgctgttttttaaaagaagggagcaggaaggaaacacaagtctatagattaagaaccctgtgtacaaaccatgaggatgccagggtcaaggtggatcgagaagctgttgcagtcctgcccaggggagtgcccaagccaataaggaaataaataggccatatgggcatggcaggaacaagaaaaataggtaaacaaaagataactgcagacatggtaccaggaacaaaggttagaaagtggagcactgtaagcccaagagagtcaatctgggaggcttcttgaaggaggaaggcataaaatagggctgtgtgggaagaagtaagtcccaaaggagaagaaaacatgtttgagcatctagggctggagccatggcctgcagcagctgcacaagccagcatgggagggagagcggcgaggcatgggctgtggtttgtggaggttcttgttgggccggttcccccagcctctggccttaccaggtttcttttactcctgcagaggaatcccaagtgccaaaacctcctccagagtctccagccccaccttctcggcctctcccaccccaaacccttgagggtctgcagccaacaggacctgaggctgggagcccagaacgggctccagtccagaacagcccctggaaggaaaccagcctggaccacccctatgagaagcccaggaagtcttctgagccctggagcgagtccaggtcaggatcagggggaagggagaagggcagggcagggcagggagtcggtgggagctatgctggggatggctataggctgggcagatggaaaagtggaaaggtggaggagagagctcctgcagtcgtgggatggaggtgtgagccttgatagttccccaagggtgctggcagtttgccctactaactttgggagccccttccactgcatccccattcttctgcacctcttgagcccctgaatggaggcattcctgccactgacctgtctctaatccttttgcagcagcccagccaccacaccacaggatgggcccagtgcctccagcctgtggcttctggagcctgcctcctaccacgtggttcccatccgtggtgttcctggccagtggcagggccgcaccagtgccccagccacccctgagatacaggggaggaggggccagtcgcagtctctgaggtaagagacagcttccccagagagatgggggacccacttagagcttatcgttggagggtgggagctcccaggacacaggtgggacaaccctgggtgacacatggctagtgccttgacttctcttaggatctcttcttggggcgcctcttgacagagaatgcactgcaccccactaagccaaaggccatccatgaagcaagtggttttcttccaaagactctagttttgtctttttgcataacttgattcaaattttctacccttgccatgtttccttgtgctggtagattattattggtcactgacaataggcaactcactttttcaattgatgcacagttgattctcattatctgtggtagttatgttctataaagtaaaattgacgcaaatcctgaattagcaaatactgaacccttgcccctggggaaatatagggttaggttcccgtgagcctttggtcacgacattttgcatcaactgattaatatataaccttatgttatgtgagtttctgcttaaggacaccttacttaatatgggttgttgattcattaactcatggccaacagcactgtaactcatacccagatgaagcttacctagcacacatattttctccacaaggcacaccacagccttttcccagtatgccttagggaggaacagtagacagcactttggcactgtatttgggggcattttaaacagcagaatcactaatcaaagcaaaaacacacacagtacataaatatgccacaaaaaggacactgtgcacttacagcatgagaactgaaacatgagggcagaacatggcctcgtttaacctcagaacttaaagagactcaaatttgtcacttttctgcagtgtccaagaatgaccatgaaagcactgtgtatattgctttggggattaaaaataaagtttagcaactaggaaaattacaaatactgaatctgcaaataatgagaattgactgtatgttactttctaagtcatctgctacttggtaatagtttaaatggctaagcgttgacaggcagtattggccataccatatggggactggggcaccatgaaagcactgctgaattctccatcagcttaaattggctggtcaggcagcactgaactgggggcagcttgggacaactgctctcaagtaaagcaatggattttgtttaatttttaaattttttttgaggcagagtcttgctctgtcatccagcctagagtatagtggcgcaatctttgctcactgcaacctccgcctctcaggttcaagcgattctcctgcctcagcctcctgagtagctaggattacaggcgtccgccaccacacagcaatagattttatattttacatgctacgagggccattttacaaaccatgcctttgtgcaaattaggaaaaggcagacacagccccatacctgggtgcattagtagagtgaagtgaaggctggatttcagcccctgccggtcttgggctgcaggtaactgctctgggtaccacatgacagcttttacacgttcaagtaaggtacctggcagtgcctaccgaacagatgctgtggatgatctgccactggacacggtgtacctaagctgaaagtacttaatgtagtactttaaaaaaagtagttaatgtagtactttaaaaaaagtagttaatgtagtactttaaaaaaagtacttaatgtagtactttaaaaaagtacttaatgtagtactttaaaaaaagtacttaatgtgctacttgatgtagcacactttacacgaatcacaagcttgtgaatgcagcaggaacacttttgcacacagggaaggaatgcgttggcacccacgcagcccggcagagggtttgttggtttgctttgggagacttgacctaagacccttgcacgagggccatgcttgggccttgaggtagagcaggactcacctgttttaactccacctcccgccccaaccccagtgtggagtttctgccccccacactcagaatgcctctctttccctcttcagggtggattccttccgggcgggtcctgagggccgaggtcgcagcgcctttccccgccgccgccccactcactacacggtgacagtgccagattcctgctttcccgcgaccaagcccccgctgccccacgccgcctgccactcctgctcagaagacagtggctctgacgtctccagcatctcccaccccacttcgccgggcagcagcagccccgacatctcctttctgcagcctctctcccctcccaagacccatcgtcaccgcggggcctgggtcccagccggcagcagagagctggtcgcccaccaccccaagctactgctgccgcctggctatttcccggcggggcggtacgtggtggtggctgagagccccctgccgcctggcgagtgggagctgcgccgcgcagccccgggccctgcttacgaggaggagggcactcccctgcgctaccagcgtctggtgccctcccgcagccgcatcgtgcggacgccctccctgaaggacagcccggcaggccgggggctcagcaaggccgccgtgtccgaggagctcaagtggtggcacgagcgtgcacgcctccggagcacccgcccccactcactggaccgccaaggagctttccgggtcaggagcctgccccttgggagagagggcttcggacgagccctgggaccccgggcacaggtacggctgctctggagggaccccggggccaggcaggagggctgttttgttggggaggggctgcaattctagtatgtccaagggtacagaggcatcaaagcagcaacctagtggccgggtaatccccgtctaggaagaacaggccaaaaaatcatttcctcttggctttggaaggcactcttggcttccctggggcacctcctaattttgcctgccatgtctagctcaagagcatatacactggtggagatgatccccgaagatagctgagactttttctctccctaaatgatgatgcacaaagcagataagcctcttcataatcaaaagtccagtccaaatcagcccctcagatttccatttgaaggtctaggacaaagggagagtaggaaatgagttgcagaagccagaacctgtgattttctgggcatcagcatcctccctgacacccctcctcaccaccaagccgagaagaagggtggcatcagagttaagagcacccaccctcaagctagaccaccaggttcaaatcccagttctgccacttacgagctgtatgattgggcaagttacttaacccctttggacctagtgtttcctcccctgtgaaatgagagtagtagagtacctatctcatagggctgccaagaggctgaaatgattagagcaatgcatggtaagcgctagatatgtgatattattatcatctggggccacagaggccagggagcaggctggagggtagtatataggatagagcaccctgacactgggtagggtggcagccttggtttccttggcccctatttcttcattctggaagtggggagccacacacaggaatcctttctttattctttctccctggtacggagggctctgcaggtgatgtgctccagaagttaccaacaagctgcttctttgagaccccagattcccagcagacccagctgcgtgtccctcccccacccacggttctttggactgcagctggcatcctgggcctggcagcaccctggccccggtccgaggccgcgccctccagctgacgtgcttttccctttctgcgcgcttgggcctgtccttggctggatagacccagcccatcccaacgtgccagacagggagggtgatgagaagtgagcccaggaaaggtgggggaggaggaggtcagggcgcctgtcacaccccaaaagaacatggaggaaaatgtgtaaagggggtccctgaagaacagagagcatcctgggaggaaggggctgagtgccagggcctgctgctgctgctgcttctgctggtcagtgtccctaagggataaggatggtgtaactgtgcctgctgtccccgcttttctgcctggttcatttacccacctgtcctttcttcctgaccctggcaggtgcccacagtttgtgtgctgcggagatcgcctgatggggcccctgtgcaagtctttgtacctgaaaaaggagagatcatcagccaggtgtaactctgcgccccacgctggaaaaaactgtttcatagaggggctgggctgagacccccccacccctgagtgcctctttcagctcccccatccccatcgcaggccgatgacctggagctgagaccttttattattttttttttacacgacttttttcagaagccctgacctaaggatttatatatgtggattgtcctcaatacccctgtgatatgattatgttttatcccccagagtttggcctactggacttaaggccttgcctgtctgactgacagcctctatctccttatataagacaagtggcaggggacgagtgaagcagagtgagccaccttgggagttctccaacgctctgtgctctggttctaagaaattccctggggaactgcccctggccctcctgtcccactattgctggaggctggacatggtacatactcatgcacatgactctcccccatttcccaggtctctgggtaccccagcctgggctgggggagaatctcttcccccttttctaatgtgctctgtgatgcacacaccaagtggtaggtcaaaggtcagtatatcccggtggtgtattgtcttgctagaccctgctattttcctgaccccctaaatcctctttagggacccagtcactataccctgtctatgccctgtgggctcccagacccctgagctttgagtcagtggcatcacagtttgtagcctcagggggtctggctgggggctggtccatgcttgtggttagtggacagcagccaccctttgacagctacctctgggcatctcaagggcttgcagccccactgctccttctaacattttgtttgtttttgagatggagtctcgctctgtcgcccaggctggaatgctgtagcaagatttcggctcactgcaacccccgtctcccgggttcaagcgaatctcctgcctcagccttccgagtagctgggattacaggcaagcaccaccatgcctgctaattttttatttttagtagagatggggtttcatcatgttggccaggctggtctcgaactcctgacctcaagtgatccacctgccttggcctttcaaagtgctgggattacaggcatgagccaccgcacctggcccttctaacgttttttcatcatagtcccaaaaaccaatactttacaagtggttttggaaaggcaccacttttgtggcatgttctggttgggagagggagtcacagttcctactccccccaccagctatgcttctgctctgagaaggtggttatttatacaaacatggacatactcactcccaagggctgatgagatgctgaattttctttgggggcattcattaattgtcccagctgcagcgactggagcaagtctggaagctgcctgtgctaagaccacccagctgtccctgggttctcatcctagggccttctttgcttccaggtcaggggacctgcttcaatgagaaagcaactgaattgaggctaggagaggtagggagagctgagttctgacttcacctgtgcagaactctctgcccccatgttacctggactggaacagactgtgaatatagcagaaggttccaagaactctggtgtctgacctagaagaggcacagttctctctactggaaagaaaacgatgtagccgattgcacaagggtgccaagggaagacccaggatggcccatcaaaggaacctgggggaggatgcaggaggctgaagggatgcacctggcatttctctcactgtgctcttaccgcatcagcaacccccaacttttgggcctactctgccccccatgcgtgaataccctgcttggatgctgtgcttttccggtttgtctctaagcccctttctccagggcatgttggtttccctggcctctcagtgtcctaactggagcccagagtgccttgttctgagccaggagacggctgagcactggccctccacacctaagcgtcctttacattaacttattggtcttgtataacacctggtgccattgccaagtggctgtgtcctcagctacagagctggaattgtgtggggtttagtgctaaatacttcaataaagtctgttttttgtgattggctgagct

SEQ ID NO: 212 - DNA, 4102 bp, Homo Sapiens
atgctgcaaatgccgaagttaaatgaaatacctccggggagggcaggccgcagggaggctcggggggagggaagatggcctggacaaacaggtcctgaagctgcgaggctggagtggagggcgcaggggcaggcgggcggcgccagagctccatgggacagctggggaagctccaggctacctacacaacctggcccaggctggtcacggtgtcccccctccctgctctgtgccctctccttccagaaatccaccatggagagtaaggatgaggtcagcgacaccgacagtggcatcatcctgcagtctggccccgacagcccggtctccccaatgaaggagctgacccatgcagtgcacaagcagcagagggccctggaagcgaggctggaggcctgcctggaggagctgaggagactctgccttcgggaagcggagctgacgggcaccttgccagcggagtatcccctcaaaccaggggaaaaggcccccaaggttcgccgcaggatcggagcggcttacaaactggatgactgggccttgcacagagaggaccccctaagcagcctggagcgccagctggccctgcagctgcagatcacagaggcagcccgtcggctgtgcctggaggagaacctcagcaggcaggctcggcggcagcggaagcactccatgctgcaggaggagaagaagctgcaggagctccagcgctgcctggtcgagcggcggcgcaatagcgagccacctccggctgctgctctccccctgggccgagagctcagtgcctctgatgacagctccctgtcagatgggctcctcctggaggaagaggaatcccaagtgccaaaacctcctccagagtctccagccccaccttctcggcctctcccaccccaaacccttgagggtctgcagccaacaggacctgaggctgggagcccagaacgggctccagtccagaacagcccctggaaggaaaccagcctggaccacccctatgagaagcccaggaagtcttctgagccctggagcgagtccagcagcccagccaccacaccacaggatgggcccagtgcctccagcctgtggcttctggagcctgcctcctaccacgtggttcccatccgtggtgttcctggccagtggcagggccgcaccagtgccccagccacccctgagatacaggggaggaggggccagtcgcagtctctgagggtggattccttccgggcgggtcctgagggccgaggtcgcagcgcctttccccgccgccgccccactcactacacggtgacagtgccagattcctgctttcccgcgaccaagcccccgctgccccacgccgcctgccactcctgctcagaagacagtggctctgacgtctccagcatctcccaccccacttcgccgggcagcagcagccccgacatctcctttctgcagcctctctcccctcccaagacccatcgtcaccgcggggcctgggtcccagccggcagcagagagctggtcgcccaccaccccaagctactgctgccgcctggctatttcccggcggggcggtacgtggtggtggctgagagccccctgccgcctggcgagtgggagctgcgccgcgcagccccgggccctgcttacgaggaggagggcactcccctgcgctaccagcgtctggtgccctcccgcagccgcatcgtgcggacgccctccctgaaggacagcccggcaggccgggggctcagcaaggccgccgtgtccgaggagctcaagtggtggcacgagcgtgcacgcctccggagcacccgcccccactcactggaccgccaaggagctttccgggtcaggagcctgccccttgggagagagggcttcggacgagccctgggaccccgggcacaggtgcccacagtttgtgtgctgcggagatcgcctgatggggcccctgtgcaagtctttgtacctgaaaaaggagagatcatcagccaggtgtaactctgcgccccacgctggaaaaaactgtttcatagaggggctgggctgagacccccccacccctgagtgcctctttcagctcccccatccccatcgcaggccgatgacctggagctgagaccttttattattttttttttacacgacttttttcagaagccctgacctaaggatttatatatgtggattgtcctcaatacccctgtgatatgattatgttttatcccccagagtttggcctactggacttaaggccttgcctgtctgactgacagcctctatctccttatataagacaagtggcaggggacgagtgaagcagagtgagccaccttgggagttctccaacgctctgtgctctggttctaagaaattccctggggaactgcccctggccctcctgtcccactattgctggaggctggacatggtacatactcatgcacatgactctcccccatttcccaggtctctgggtaccccagcctgggctgggggagaatctcttcccccttttctaatgtgctctgtgatgcacacaccaagtggtaggtcaaaggtcagtatatcccggtggtgtattgtcttgctagaccctgctattttcctgaccccctaaatcctctttagggacccagtcactataccctgtctatgccctgtgggctcccagacccctgagctttgagtcagtggcatcacagtttgtagcctcagggggtctggctgggggctggtccatgcttgtggttagtggacagcagccaccctttgacagctacctctgggcatctcaagggcttgcagccccactgctccttctaacattttgtttgtttttgagatggagtctcgctctgtcgcccaggctggaatgctgtagcaagatttcggctcactgcaacccccgtctcccgggttcaagcgaatctcctgcctcagccttccgagtagctgggattacaggcaagcaccaccatgcctgctaattttttatttttagtagagatggggtttcatcatgttggccaggctggtctcgaactcctgacctcaagtgatccacctgccttggcctttcaaagtgctgggattacaggcatgagccaccgcacctggcccttctaacgttttttcatcatagtcccaaaaaccaatactttacaagtggttttggaaaggcaccacttttgtggcatgttctggttgggagagggagtcacagttcctactccccccaccagctatgcttctgctctgagaaggtggttatttatacaaacatggacatactcactcccaagggctgatgagatgctgaattttctttgggggcattcattaattgtcccagctgcagcgactggagcaagtctggaagctgcctgtgctaagaccacccagctgtccctgggttctcatcctagggccttctttgcttccaggtcaggggacctgcttcaatgagaaagcaactgaattgaggctaggagaggtagggagagctgagttctgacttcacctgtgcagaactctctgcccccatgttacctggactggaacagactgtgaatatagcagaaggttccaagaactctggtgtctgacctagaagaggcacagttctctctactggaaagaaaacgatgtagccgattgcacaagggtgccaagggaagacccaggatggcccatcaaaggaacctgggggaggatgcaggaggctgaagggatgcacctggcatttctctcactgtgctcttaccgcatcagcaacccccaacttttgggcctactctgccccccatgcgtgaataccctgcttggatgctgtgcttttccggtttgtctctaagcccctttctccagggcatgttggtttccctggcctctcagtgtcctaactggagcccagagtgccttgttctgagccaggagacggctgagcactggccctccacacctaagcgtcctttacattaacttattggtcttgtataacacctggtgccattgccaagtggctgtgtcctcagctacagagctggaattgtgtggggtttagtgctaaatacttcaataaagtctgttttttgtgattggctgagct

SEQ ID NO: 213 - protein, 663 aa, Homo Sapiens
MLQMPKLNEIPPGRAGRREARGEGRWPGQTGPEAARLEWRAQGQAGGARAPWDSWGSSRLPTQPGPGWSRCPPSLLCALSFQKSTMESKDEVSDTDSGIILQSGPDSPVSPMKELTHAVHKQQRALEARLEACLEELRRLCLREAELTGTLPAEYPLKPGEKAPKVRRRIGAAYKLDDWALHREDPLSSLERQLALQLQITEAARRLCLEENLSRQARRQRKHSMLQEEKKLQELQRCLVERRRNSEPPPAAALPLGRELSASDDSSLSDGLLLEEEESQVPKPPPESPAPPSRPLPPQTLEGLQPTGPEAGSPERAPVQNSPWKETSLDHPYEKPRKSSEPWSESSSPATTPQDGPSASSLWLLEPASYHVVPIRGVPGQWQGRTSAPATPEIQGRRGQSQSLRVDSFRAGPEGRGRSAFPRRRPTHYTVTVPDSCFPATKPPLPHAACHSCSEDSGSDVSSISHPTSPGSSSPDISFLQPLSPPKTHRHRGAWVPAGSRELVAHHPKLLLPPGYFPAGRYVVVAESPLPPGEWELRRAAPGPAYEEEGTPLRYQRLVPSRSRIVRTPSLKDSPAGRGLSKAAVSEELKWWHERARLRSTRPHSLDRQGAFRVRSLPLGREGFGRALGPRAQVPTVCVLRRSPDGAPVQVFVPEKGEIISQV

SEQ ID NO: 214 - DNA, 152224 bp, Mus Musculus
  misc_feature (1)...(152224): n = A,T,C or G
gcggctcagcttccagccagctggacgagggcaagtgcgcctacatccgaggtacggcggccagggcggcagggtggcgcagagccagggctagcctggtcacctgcacgctgatcttccgagggagcactggctagctggtgctaccggcgggcgttgggctcctagacttgcgctcgcctccgggagcggagccccggtgtcctgtttcaagcacccgcgactcaggtggggtagagagtagggacgggatgatgcaggacacacgtgagaggcaggtactcccagggtggctggagagaactttgttggtgccccctcgcactccacccctcctgcccccgcactgtgcccctccagcctcagaatctgttccttccctgctggggagacatctttcttgtttgtacttggctctgagtaatttccaaaggttagaggtttactggggttatcccctcgagttttgagatttccttagtggtagtggtggggagttcctgggctatcagaatttccctccgggtcatattggcctggttttgtaaagtgcagcgcaggccacaccttctcctgaacttcacaccaattgcagggcgatttcatcagaagcagaaaggatgaaatctttaccttttcaggttggatggttcccttccttcccctgagagggaggaaaacaaaaggggaagctcggagtgtttttgcaacagttgttaaagctatagatggggagaaacatctttttaggagatcttgacctacggagtgattcagtaagagagagacaggcagaagaaaccaaaactcggtggcacagaaactgcaggaaatccagagttcttatctttcgttgtgtttggttcttaccccacccaccctaatcttgccctcagccacagacattcagctagctatgaatttagtgccccactcctggcttcccaagtactttgaaaagtatgtattaaaggagggctactgatttctttgagttaattttatatgcagccactttgcagaatttatcagctgtaggagttctctggtagattttggggtcatttatgtatattatgatatcatccaaaaatagcgatactttgacttcttcctttccgatttgtatccgcttgatattttttagctgtcttattgctctggctagaacttgcagtactatactgaatagatagggagagagtgagcagcctttactttgttatgcttgcagactggagtctagcatgattgtcctcttagaggctccaaccagcagctgactcatacagatgcagacacccacagccaaacagtggatggggcttggggactcgtatagaagaagaggaggaaggattgctgccctgaagggaataggaactccacaggaagaccaacagagtcaactaacctggactcttagggttctcagagactgaactaccagccaaagaatatacacaggctggacctaggcctccctgcacatatgtagcagatgtgtagtttggtctccacgtggttcccaaacaactggaagggggttatcccaaaagctgcccatggaatgtgttcttctagctgggctgccttcagtgggaaaggatgtgcctggcctcgaagagactttatgtgccagggtaggggtgtacccagggggcctccacccactcagaggagaaggggaggggttcgggggaaagcattgtgggagggggtgactgggatggggccagtgaataggatgtaaagtgaatttttaaaaagtatgtattaagctccaagttttactttaactttttagaagaaacagtgaactttttcctgatgcccctttctggcccttaagattatatctaaaagaaatacatttattcatttattaattctgtatttgttgtcagtcatagtgtttcaaaacctttttaaagggtgccatataaaggcagattcaaggcaggagctataattgattttccagattcttgcttctgctcacttcgggacagggagttatcagtgtgaggggacaagctcagtcacttgtccctcagtggtggtcttggccctctgcacagggagaaaagatggagattttatttaagactaagcctgctaattttactcttcactgttcaccccccctcccccccgtgctgggctcagagatgacacagaacactaacaaggggcttgcattagcccgtgagcaaaattgtgtttgtgacgtttataagatgtttcactgcatagtgagaagcactgaaagttgatgcatagccagttacaagtatcaggatccctggcaaggttggtgatgagctgccttgcaggcctggttcacacacctcaaggtcatgacctttgttatgatttgatgcaagtattgtactcaaataaggaaaagtgttagcctctttattctaaaacaacattgatagacacacaaaagtcactatgtaaggaagatgcaataatcgtatttaagttagtaaaactatagtcattacatcccttagtcttggattgttttctctctttctgtatttggaagggggtttgcatggcatgtaagctggggagggaagaaaggagttaaaatacctccagagaaaatgagcctctgcttcacgggactggcggccctgagcacgccagaagggaaaagagccttggaaaaatgcatggagcttgaaattattcctgcatgagcaaacagagatcacggggttctgatttccccagcagttttgaagcttcaggtccctaaataaaaccctacccctgcatttatccctccgcccatccttcagcccataaatatcctcaagctttgagttaattgtaagtaaaacaattggaggtttgaaggtcaagtttaaatacagttttacgatctgctccccataaagtagccacagtgaaacatacatttgaaagctgctgctgaagcaataactttctttggtccttgatatatactttgccaggacgtggaataactagtccataatttttttttttttttttttttttggcttttggagacagggtttctctgtatagccctggctatcctggaactcactttgtagaccaggctggcctcaaactcagaaatctgcctgcctctgtctcccaagtgctgggattaaaggcatgcgccaccacaccctgctagtccataaattttaagccatgctgactttgtatctgtttgaagcggctgtacttctagaatggtaacactctaaccatgctgactttgtgtctgtttgaagaggctgtacttctagaatggtaacactctaaccatgctgactttgtatctgtttgaagcggctgtacttctagaatggtaacactctaaccatgctgactttgtatctgtttgaagaggctgtacttctagaatggtaacactctaaccatgctgactttgtatctgtttgaagcggctgtacttctagaatggtaacactctaaccatgctgactttgtgtctgtttgaagcggctgtacttctagaatggtaacactctaaccatgctgactttcaggctgatcctttaacaaggaccatttgattttgtgcctcaaaatttggcatggatgttttgacaggacttttgtttcttagaattcagtcaatcttcgggtaaagcaaggccaggtgtgttatagaattacttcattccgagtgtggcagttttaaatatcacccaatagcctaaaagggattaattttcggatggcttagagggcttctaataacttcccatgatgaggcatatttattaataagcagggtggaggctgacttctcctcatgatgccctctggtagcctttagtaattacttcattattctgtgtaaaggaattatattttcctttaatcagggatgcagctcatttagtcagtggtcagcttaagatgttcttctctttttatagcattaaaactttttattattattttgcctgcgatgtgtgaggatgggtatgtccttgcatgcatgctgaggtcagaaggcatagagctggccctctctttttaccttaacatgggctgcagaggttgaactcaggtctccaggcttaagtgacaactgctttacccctgagacatcttcctggccctttttgtgtcatttataaaaaaaaaaaaaaaaaaaaaacaagactccctaaaactggcattgttaaaactttagatcagtagttctcaacctgtgggtctcaaaccctttgggggttgcacatcagatgtcctgcacatcagatatatttacactgtgacttatcacggcaacaaaattacagttatgaagttgcaatgaaataattgcatggttggggtcaccacaatgtgaggaactgtgtgttaaacggttgcagtataaggaaggctgaaaaccactgccttagatgaagcagacaaacaaccatatctataatgtttttttttcttgttgaaacaataactttattcctttttagaatgaagggttgagggttggtgacacagctcactgggaaaggcactccctgaggccctcattccgattcttagagtccacctgatgaagaagagaactgactctcacaagttatccctgacttccacatggtacaatgctccccccacaaaccaaccaaccaaccaaccaaccaaccaaccaaccaacgtaatgcaagatttaaaagaaggcctagggaaatggcccagcaggtaaccatgctgttgctaagcctggtaacatgagttcaagtcccaggattcacatggtggaagaagagagctagctcccacacacttcacacttgtgccatgacactacattcccacctctacagaaaataaataagtatagaaaattaaaactactattgaattgttgtttttgtttttgtgagatagggtttctctgtgtagccctagctgtcctggaacttgctctatacaccaggctggcttcaaactcacagagattcaccagcatctgcctctggagtgctgggattaaaagtgtgcactaccatgcctggtttaaattcagcaagcaagaactggggtgccagtataggtttggtgggcacatgtgagcctgctatcaggaagtagttaaggaaactgttcctggacttcccagggcctacaagtggtcaagggggccaacctgacacccaagtggagtaagtagttaagcaagttcttacagaaagcgttcttcaattgggggcctcgatgtacacatataatggtagcgcccaggaggctaggcgaaggcaggagagtcatgacgtcaacgccagttcaggctgaaagaggaaagggctggagggaaggaggcagggggaaagagaatgatccttttcctgaactcactgttacagtcaacggacagcctgagaagggctcagtgacttcctttgaaatgttcatcgacgagccgatgcctttagtgaatttcaggttcattttaaaaattaatgtgtagatctgtatgcctttgtgggtttccgtgtatcaggtatgtgtgggtgcccctggaggccagaagagaacagtcccattacaaccgaaacttacaggaactgagaaccacctgatgtgggtgctgggaactgagctcgggtcctttgcatgggtaacgtgctctttttaattaaattaatgaatgaattaattaagtgtgacagtgtgtgtgtcgggggtacatgtaacacagcatggtgcatatatagaggtcaaaggacaacttgtaggattaatctttcctgcaagcagtatactcttaactactgagctacctcccaaactctgggctttaatttaaaacgttgtttttcctcaggacaatgctttcatattttcgtgatgggttaacttaggtgacaaagtcggaaatttaagctggagtgatgttcccttgggcagaggagaggtgagcggctcccattagagttctgtccgagttgcgtgttcaggtcgagtattcactcattttcagttgttgccgagagatgggcatctgaacagatcccatttatctggataataggtgtgggctcagagtccagtttcctgattagtaatggtagcatcatcttcaatgagacaattagaatacagaatggggcagccactgtcagaagccaacctgacatcccttcccagatagggaagtatgacagaccaaatatggatcccacccaagtccaacttggtcaatcacaagtttcattggcattacttataggaatatatgtgaggggttgcttacaggagcagaaaggactcaaagctacatcaccaaagcccaccccagcatgcgtgacaggagacagagctaggagcctggaaaacaccacacagcctacaggcagctcagcaggctggaaagtgtcctttgcaggtgactgagttggtctgagtctgttctagtcagctcagctcgctggtctttgtttcttctgggcaggggtgtttggtacttcttccagacttgtctagcaaagtcttctttgcagcttgtcttgtctgagacagactttcagcagtgtttactgcttctagactcttggtgagggaggggcctagtgaatctggtcagattcagggatttcctgaaatcttgggttgtttacatccataaaggatggtgggttttctcaacctttcacaggagccaccagaaaacacagatatttatattaggactcataacagtagcaaaattacagttatgaggtagcaatgaaaataattttatggttgggggtcagcacaacatgaggagctgtattaaagggtggcagcattggcaaagctgagggccactgccctagatcatcctgctagtttacctccttgtaaaaattcagtcctaaaatatccttttgtttcactcttcctttatatcccatatcttaagaagtttcccttcaagatggaagggtttagctttgaggaaattactgctcgactataagatctggtctcaaaacaccaaccagaaagtgagaaagattggtagtgacctcctaacagcttttctcttctgtcttcattagtggagcatgcagtttttaatctaataaaatactcccaggctcctttgcatcaagatggggacatacaagtgacttttggtcaatgagaatgtaagtaaaagaaagatattggtctgcagatctaattggataggaatggtgttttttatcctgtccttgatgctggctggatgtgaacttgtcgggaccggccattttggacaatgacatatctttttagggagcttatacagagcagagctgagggatgaaagcatcgtaggctcctgtggaattcacataagtagaaccttcagatgaagcctggggctgctttcctttggatcttaataagagagaaatcaacttatgtcttatataagccattgttatttatagaattgctactgtacacagagaagccttatcttaactaatatagttgtcttctgttatctgtggcccacagtatcccagccaacacacaaaatgccaccatgttgggtctcctttaagaaaaaattggtccaaagacagtaggaaatggtaatcaatgtactgttagtcttagctttaggtctgcctgcctctgcctctcaagtgctaggcacactattcataattaaccacggcagagccctctgtccccagcctgaaacagcctctttctaagaagtgagaaactgttgctcaggaaagaatatagagatgttaaagaaaggagatggcacagtataagtttattgtggtctaatatataccttaaatctgctgggcactggtggcgcacacctttaatcccctcacttgggaggcagaggcaggcagatctcttgagtttgaggtcagcctggtttaccgaacaaattccaggactacacaaagagatcctattttaaaaagaaacaaaactcaaaaccaaaccaaaccggaccccccccctccccgcccaatcttaaatctttccaaagtatggatgaagcgaatagagatttgaagtaaggaacattaattacagaagactgggaatttctatcatcttttacccatctttatgaatgggaaccaaggcactgtgaatgagaagataatctttaagaaaacccaaatctaatgtttagaattagagacaattctggacttgaaagggttaattttgttttatttataatttaattaaaatacatgtactgcagaagccttataacatatgcagtgttagtttggcctcctaaacagaaacttggagagctcttttgttagtaaagaagtatggggcagatgacaaccatttgcatgggaatgggaagtaaagtcagagtagaagggagtggaggggagggaaggagaggagaggcgaggggannnnnnnnnnnnnnnnnnnngaggtgtgagccaggcttgagcatgccgtatcatttctatttaaccagaaagagacagacagacagacagacagagacagacagagaaagaagcagacatagacagagagagagacagaaagagcaatagagagagagagaaacagagagagagacggacagagacagacagagacagagacagaaacagagagacatggagagacagagataggaacagggacagaaacagagagacatatggagagagagagagagagagtgtgtgtgtggttgccactggattttttcctcgggcatcttcctctgcagcaaagggacagaagtgtgtgccactgtgccgggcttttatgtgggtgctgaggatcaagcacagggcttcctgcttgtgcagaaagcactttgtcctcaaggcaccacccccagctctgacaaccacacagcatccctttgtaccttctgttggaaattttcccttcatagatgggttccactgagcatgtggaccccaaaccttcaatgaagagtcttaatgctgcttttaagttgattcttacgaggaagataggctaaaggtttgctgtgtctttcggcaagttagaatcctctaaacctctactgtctaagcatatgtacataacttaaattaaaacacaatgtcaatttgataatttactgtgagttttgaagatgcaaattcaaactataccaattttctaagtgacttgaattacatcaccagtagccattttgtacaatgttgtcactattggattaagttaaaatgaaataatcaggtttaaaagcttttaaatgctgctattagaaacctcacaattacatttaaggggctggagaattgtcttactggataaaagcacttgttgctcttgcagaggatccaggtttggttcctagcacctacacagcgtggctcacaaccatccataactgtagttccagagatctgacaccctcttctgacttatgcaaacacgaggcactcacatggtacacacacatacatataaggaaaaccatccatacatcaaataaattaaaatctaaaaaaaattaaattaaaaaattaagcttggctcacacttattgttcatgtgtcatttcttttaaacggttgtacttgactcaagattcacagcgattgattccacagtgatggcaagagtctggggtggcagggaaggcaagtgtctgtcctcgctgtgagccaatgggatgtatgagctcacccgcactgctccagaacggcagatgcgggactagaattcaggcggtcatgtttctggttctcagctctttttcctaacctgtggtgtccaaccaaatcaatccaagccaaaccaaaccccaaatccccaaatggaagcttccggtccagatcagaatgatactctaattcagagctataaataggaaccttaaaatgacaagcttttccttctttcccctagtctgacatattcttcagtcctagatttaaaatcgactataactccttgctatccaaggcacaggcaccaggtaggctggtgagaacaagtctcctgtcagccctgataaaagagacctgaggtcgatctctaagatttatttaatttttatttatatgaatatactgcagctatcttcagatacacattagaagannnnnnnnnnnnnnnnnnnngggaagagaggggaggggaggggaggagaggagagaggagaggagagaagaaggtagtggagtggaggggagtggaggagagtgaggggaggagagtggaaggaagtggaggggaggagaggacaactgagttttaaaaagacaagcataaaacacaactcatctgttaagggccatttaaggcatttttagaaaatatagttcatgcaagctaaaatggtaagagttttaaactaagaagcagcgcacacacacaatgcaatacagattttgttctcagaaactgggaaatgcatttagaagagagtagcaaattgctgccaataggaaaaatgcaagccagcaagccaacaagccagcaagccagcaagccagcaagccagcttttaaacgtgtccttctctttggtactgcatggtttttctcacaggaaaaaaataaaaggtttagagagatgaaagtaattaattctgtcttgcaaattgccaggactaggacccaaagaagcttgtacgtctgtgcttgatgttgtgtggaacaagtctatgaggtcagaaataaagagtagtttttgctatgatcccagaaatggggtttaaaaggcttgagggaattttggaagaaaggcctacttctctttgccaagccacgtgaacatttatttccctttccttcttaaacactatttttattttaaaataaaacacagatgcagaaaaccacgcggagcagatgcatagctcagcgagtcactatacgtcaacaacatccatgcaacccatcacccaggtggagggaaggcccttcctggcagaagcctctatgtgcccttgtctctccaaaacagccactgtcttcagctatttattaacaaccaacaaactaccttgaagagactggcacttttatttatttgcttataattcttctatttcaactggctccagctgggtggttctgtctgtctccattggtgggtattctgtggctccatttagctggcttgtcagctggagattcaactcacccaaggaattctttctttccaggtgagagaaattgaactctttcgatgtggtctcttcagcagagtacagacttttaaaatagtgagccagggtttgctagaatgccatgcgttcccggtactcatagctagaaccttctgctctgatgtacttatacctcgaattgtgaggcaaagaaaaccttttcatcttcagttgattgtcaggtattttgttatgacagcaagcaaagtaattaatgtgggtgcctcggagatgcagggtgcttttctgctatattatgattagagaaagtctccatcatcctggatttgaggagggactacacacagaatattcaggacagtatccaatcacagtctaccaggccgataatctcagattttgcaatgacttcttaatacttccttgtggtatcactattgtcttatatacttaagcacacatcttctttcaagtctcctctaagctaaagtgttcctcacaagtctttcttttgcttgccaattgtctggttaacagatggacttttccatcgtctggagtttgcccgtggtgcagttccacacattcttctgtgttttcaacaagacagagaggagcaagctctagatcagtctgagagtcagtcccctagtcagtacagacagcacggggttcctcatcagaagtctagtggccttcatgtgttggttctccttatctaatgcaggaggccacggctgctcatcatcaggactcataattcactgtcttcccacttgttttctagaagacgtctctgacagcctcactggtcagaggcaagtcacaccttccttagtcatcactggcgtcttagttagggctttcctgctgtgaagagacaccatgatcacagctattcttataaaggacatttaattggggcaggcttacagtttcagaggtttagtccatcatcatggtggggagcatggcagcatgcaggcgtctagacatggtgctggagaaggagctgagagttctataacctcaacggcaggaagcagaaggagactgtgagccacactgggcgtggcttggacataggagacctcaaagcccacccccacagtgacacacctccttcaacaaggccacacctcctaatggtgccactctctatgggattaagcattcacacacgagtcgtgtgtgtgtgtgtgtgtgtgtgcgcgcgtggggggtgggggnnnnnnnnnnnnnnnnnnnnnnnnnnnnnnnnnnnnnnnnnnnnnnnnnnnnnnnnnnnnnnnnnnnnnnnnnnnnnnnnnnnnnnnnnnnnnnnnnnnnnnnnnnnnnnnnnnnnnnnnnnnnnnnnnnnnnnnnnnnnnnnnnnnnnnnnnnnnnnnnnnnnnnnnnnnnnnnnnnnnnnnnnnnnnnnnnnnnnnnnnnnnnnnnnnnnnnnnnnnnnnnnnnnnnnnntgggggtggggggttggcattcaccataactggtaagagtgtggaattagcatggctggctagcccagtgaagattactcctgggctgggtgcctcactgaagaacacggtgaggaatacgatcatggtattcctgaacaaaatcaggtggagggacaagaaggacatggcagctggggaggtaaataacattgaggtcatacatttgctctaagggccatgaagggggtaaaaggggcttatgacaggatccatgatggcgcttaggcaggagatgaagtgttagatgttagatgtggtatttaagatcatagttgctgtgtatatgaaagccagggcaagagcctgttgggttcttataggaggggaagaaggcaaggagttgaagaggctgaggaagggttaggtgtggtgtgtttgagagactgagatgtgggagagacttgggggaggggtttcctggtcctagtctatttctctcctagccccagggtcttgacttggtttcacgttgacgtctgcagccagttttgcagcagagaagttttggattttttttaaaacaatcttaggatgagaccaattaacaatgataatagaataggaaagagcttttggggcagtgaggtataggtttgctgcctggcccaaattccatctgcagaacccatggaaagagggaaggagagagccaactctacaaagctgtacttggaactctacccacacatcaccacagccaggcatgtgtgtgagtgtgagccttgacccccaacatcatatacatatgaaataaaaaagctttttaaaaagaaagaattcaggaattaaaaaaaaaaaccctgtgatcaaaaattagtgttattgtttcttggataacaaagttaaaatatttcagaaaactgcacagacatctgaagatggaaaagtaaagaagacaatattaagagtcaataaaaatcttagcatctgactagagaataaagaaaattaaggactaaaactactagagaaataatagaaagctgtcttctataacagatcatgtgcctatggatttatagggccaggcaatttcatgaccccggggtgggtcatggctcccatcttgcaaagggagaatatccttgccatacacaagactgagcagagtcctcggtgagcagaaatgagctctgaaccacaggccactctagactttaggacctgactaatgcaaagtcaaaacaagcttaagaatcaagctcaccttgaagtaattaggaacatgttccatacagcagaggaacacacgtgccatgaaacgcgagaactagaaaaaaaccatactctcagttgccagtattttgggagacgacatgacttctgtgtttctgttcccttttggaacctctggggggagaagaagctgtacccacctgctggcaacctctgtccctctccagaggactgtgggggaccttgggggacctgctgagactccagggctggtctgggcctggccagaagagcagggtaggttcagagatgaaggcaaagcatggcttctcttttagaaggatgtcatttgtcgtggtcaggtcccctcgactttggggctcacacaaagcaagcaacagtttctgtgttttgctcaaaagaatccagagcattttccaaatttggattgaatgtgtttgtttaaaattttatttcctatgcaagtcaggctcaaagtgtgaggtgatatgtctgagtaattgcccaagcaaaaagacacaggcttagcattagaataatgatagattttattagcaacaatggcaaatgtgtaatatctggagtataaatatttaaaatggctgtgttggagagaatgattaaatgggtaacaagagttgaaatgtcctgtttaaatgtaaagtaaataagaattttggagcatgactaaggcctgtgtaaaccaactgagatgtcagatcttaattaagaatagctgaatagctctctacgtgagacatgataatggcaatagtaaaagttgacatttattaagtgcccactgtgtacccagcaagcaaatgtctcagatgaagaaatgtgatagctaatgttcttttagattgctgagactgtcttctataaattcattcctgtaacttaccccagagtagaaattaaaacatttactgagtgtttttgttttatatctcagatctagatgatctgcttttttatttaaacaaattttagttgtatatgtaaatgtgtgtgtatgagtgtactgtatgtgtgtgtgtgtacatggttgggagtaaggctatgggaatgtcctatttttgctttttgttgttgtaatatcatgagcaaaagcaacctggggaagagaggatatatttggtttgcgtatttcaatcacagtttatcactaagggaagtcagggcaggaagtcaaggcaggaacctggaggtgggcgctgaagcagaaaccatggaagaatgccgtttattgtgttgctttccaattgcttgctctgattgctttcttacacaactcaggaccactacccggggatggcacagcccacgatgggctgagttcttctatatctattaacaattaagaagatatcctacagatatgctgtggtcccaagacaatctgatggaatacttcctcaattgaggacctctcttcttaggtgactctagtttatgtaaaacctagccagcacaagggacattgggcgtcttcccccatcacttcccactctgaacctgttaacacgttttagttagactgacaaccagtgacccagtgatcctcttgtctctgcactctgccctgcccctgccctggggttcaggcacacacgcccatcggcccatcccgttgtgtgtacttgtatgctgggattcagactcaagtcctcactttagctcagcaagaattcttaaccaccaagtcatttctccagcccctgatctgctttttttttcgagatgaattttttaatggatgggatggtagatcataaatagcttaatttagaaactaaaatatatccaaacactactaaaacattgtgagacttacaaacaggttaaaaaatcatttcagcaccgcctccccttttattcttcgaacaaaatgatgactttaggcaacttcttcactagagaggaaaatatttatgttgaggcgcaaggtctaagtggcttactatggagttgttgaatgtgaagaccacgtaagacgatgtcctgaggacttgttgactctgaagctgagttaattctttgtaaccttttgatctgtggactgagtgccttcagtctctcctgtgtaaaaaggggacaggtgaactagaaagatgtgtcagagggaaaagtgggcacaaggacgaagggaggcagagaggcaagaaggatgaagagaagcctcctaccatggctgtttcagtcacaatatgatttcacggctcccgagatcagaaggggaagtccaaagccacttctggccacctggaatactcccgctgtgacttggcagttcctacaaaggtctcttcctaatgcccttcctggctttagggcagtggttggtgttcaatcttgagaacagttacttagaagtaactgtttctgtttagctattgtgtctgactctttcataatgaacaaggaaagcaggataccttacatgcagtaatttgtaaattcaacaagctgttgaaaagaatctaattagtgctaattacaatgctagagtgtcccaacacattataatgccattgcttctgtaaaggcattgtgtttaaacactcaaacattaattagtctacagaacaaatgtgcgaggcaggtattatatggcaaaatgtgaacaccaattatttattctgcaaaggctcaatgccattgctgataggaaaataaattgattagcataatggtagggatgggagatctgaggaccacagtacattgattacattatattattcatttctatgcgcctttttttttgagacagaatctcatgtagttcaaactggcctcatttactatacagctgaatttgattttgaactcctgatcctcctgtctctagctcccaagtgctaagagatgacagacgtgcactacatacaatgctaattctcttcctcttagtgcacatgcacttgaagtaggaaccactgggcagtggcttgaagctgcatttcatgtgtacgttaatgagaatgggctcagagctgaaggaagtaccctcagatctcagtgatccaatgtgacttggtgaatggaagttaccattgtttggggacaaacattttttcactagtacaaatgcaacatgaactcctttagacctcttcttagaatgacattttatttgtttatttatttacttacctatcatcatgacatttttttaaataaaaaagaaaccaacattatcacaggattaaaaaagcaaattaattttgctatagttttaatcaaaatatttaaaaattcctgtgctatagtgagatagatgcttctttattcatttattcaatgacaaaggtcttgtggtaggctaattactcctgtcactgtgaacaagtgctattctaggatacgtgggaattgaactgtgctgtgaaaacatgtgtgagctctgcggatgacagggtccgcgaatcctacaatgctgcgctgcctttattcacaactgagcaggatgcagaattgcagttgtggattcatagaaataaagatgctagtcttccctcttcagctcctggtgctcctgaaccctctccacagactctgtgctgctccttggagccacatctaagagcccccaccctcctggccccattattctcaacactacaaaaacctccaaatgaaccttgtgtacaggtttgcagcttagggaagagggaggtgtgagccaggcttgagcatgctgtatcatttctatttaaccagagaaagacagtcagtcagacagacagacagacagacagacagagaaagaagcagacatagacagagagagagagagcaacagagagagagaaacagagagagaaacagagagagagagagagagagagagagacgaacagagacagacagagacaaacagagagacatggagagacagagataggaacagggacagaaacagagagacatggagagagagagagagagaaagaaagagacatggagagatagagatagagatagagagagaggcagagtggttgccactggattttttcctcatttgaccgttaccttactctttttgaggcagagtgtctaattgaccctggagctcactcagttgttacactggcgagccagccatcctcgggcatcttcctctgcagcaaagggacagaagtgtgtgccactgtgccgggcttttatgtgggtgctgaggatcaagcgcagggcttcctgcttgtgcagaaagcactttgtcctcaaggcaccgccccagctctgacaaccacacagcatccctttgtaccttctgttggaaattttcccttcatagatgggttccactgagcaatgtggaccccaaccttcaatgaagagtcttaatgctgcttttaagtcgattcctaccaggaagataggctaaaggtttgctgtgtcttttggcaagttagaatcctctaaacctctattgtctaagcatatgtacatagcttaaattaaaacacaatgtcaatttgataatttactgtgagttttgaagatgcaaattcaaactataccaattttctaagtgacttgaattacatcaccagtagccattttgtacaacgttgtcactattggatcaagttaaaataaaataatcaggtttaaaagcttttaaatgctgctgctgctgctgctattagaaaccttacaattatatttaaggggctggagaattgtcttactggataaaagcacttgctgctcttgcagaggatccaggtttggttcccagcacccacacagcgtggctcacaaccatccataactgtagttccagagatctgacaccctcttctgacttatgcaaacacgaggcactcacatacatataaggaaaaccattcatacatcaaataaattaaaatctaaaaaaattaaattaaaaaattaagcttggctcacacttattgttcatgtgtcatttcttttaaatggttgtacttgactcaagattcacagtgattgattccacagtgatggcaagagtctggggtggcagggaaggcaagcgtctgtcctcgctgtgagccaacggcatgtatgagctcacctgcactgctcagaacggtagatgtgggactagaattcaggcggtcatgtttctggttctcagctctttttcctaacctgtggtgtccaaccaaatcaatccaagccaaactaaaccccaaatccccaaatggaagcttccggtccagtagaatgatactctaattcagagctataaataggaaccttaaaatgaccagcctttccttctttcccctagtctgacatattcttcagtcatagatttaaaatcgactataactccttgctatccaaggcacaggcaccaggtaggctggtgagaacaagtctcctgtcagccctgataaaagagacctgaggtcgatctctaagatttatttaatttttatttatatgaatatactgcagctatcttcagatacacattagaagagtccatcaaattctattatagatagttgtgagccaccaagtggttgctgggaatcaaattcaggacctctgacagagcagtcagggttcttaaccactgagcatctctccagcccctgaggtcagcctctaaagtaggggctggagaaatgggtcagtggttataagcacttgctgttcttccagaagatctgacttcagctcctagcatccacattggtagcttacaactacctctaactctggctccagggagttcgacattttcttctagcttctttgtacacacacacacacacacacacacacacacacacacacacacacacacaaactcacatatgcatgcacagccttttctaactagagacagaaaaatgagtggatccgggtgggaggggaggtgggaggagctaagaagagtagcgggaggagaacagtagtcaagatgcactgtatgagaaaagaacctgttcaacaaaaggggaaaaaaggaataattctgatgtttctgatctgagcagtttattgaagtggggacaatgggggggggggcacactggagtctgcaaatgacaagttctttttcaaatacaccgtttagaggttcaagtaaatggcagtcagatgtctcatctgatacgtggctccccatctaaattctctccacaaccctctgagataggtgctgctatggttattttttgcagagggcatcccaagccccagggaagctgtggtaaagagcacatgtctaatgtgtaatctgcaaagctcccctagaagacaaagcccgagcttttatttacagtgctctttgctttatcgctcttgagaggaaggaggctgggccgcagggtgcccgagctcagccccagtttccacagggagtttgctcccttggttttacaacagcggcctcatctttctttgtgaactcttatggatcccttgaaagggattgcacctcgggtcagaaataccgtttactgtttaagagcagaaagattctgttgacgtagatttacaatgtattttatgtctgaggattacaaagaattttcagcacccagtagtatcattcgcgagagcaaacaagaactgtcatcgctcggagttattgtttccaaaggaaatgagcctgggccctgatctacgtccatcagtgtctccttttatagctgaatcaggcgtctgggcatgaattttcatgtctagcatatcctaatctgaaaccattttccttttgtgcagcactccagttctcccatctatatttcatgataggctttccacgaacaagtgcacacaggatggcgatgctctcatttgcataagcatctccctgacaggtcatcggatatttttattgttcttgagtacatttcctggactgctggaggcatgcataatcatctctagcaattcatctttttacctagcttaatggcccctgctatactgaagaagaatgatggagaaaaaagaccgtgtggccagggcctgtctgcccaaaaatggaagtaaattactctggtggaagaaattatattaactctttctcatcattcagtttcctttgtaaatttcatcttggtgggctaaacaatcctggatgcctgcagggaaagtcaccttcccaccagcctcctctgatcccttgtcagagccacggtaatatattgggaccaatttcacttctgcctggagacctgcctaggagttaacaaagacatggcatgagtagacaggaccaatgcattcctttagtgtggggctgagaggggttcttattcactataaggtggggctctgggggaaaggagaggggggcaggttggcctggaactcactatgtatagtccaggctggcctggaacttggaactcttctgtgataacctcttgagtgtgctggagttataggcacgatagagccattttaaataagcattggattgaagtagatttttgactttgttgatcttgacttagcagtcaatgatgttggtgatgatgatgcgtatgtggaccacctggtgactgtgatcactggccaatagctaccctgtggcacagcagagacctagtttcattctgtgtaattttctgtggatattgtcatactcaatttccaaattaagatctgacttaaattctagttttttttcctttttttcatttgaacatatgtaatatattgattgtcccagttcagttttgatagattcaagagggaactttgacataatcttatcctgagaaagaagtgagtgtcccaagctatcccttgtctttgaactttgagtacgttggactctcacaaaggagatctgggtgaccatgtgactggttggaaagaaagtcacaagggctcaaagcagcccatatttgggttttattcagaaaaccttgcacaaactgtctattgggcctcaagtcttcaatatgtaaaatggaaagtaacaatccacttggctttggtgtgagggtcagtccatgcttgtaccgagtagttgctgtaagtctattctttgagcaacaatccaatttcaatacaagatgtaaggccactttctcattaaatatcaggtctctaatacacccagaaaactttagaacaaaattaggaaaaggactaaaagccatcacttttatttaaaatcttttaaaataattctcaatataaatcaccccatggagcaggaaggaaaatacaaaagaaaaaagtaaattacccaagagtgattaccagccaacatttgataatattgttaagtaatttcttttccttctttctctttataccttcccctctcttcttctgtttcatatgcatttccttattcccacactataaaataaaattttggatcatagtttatattcagatctatatacaccatggttatatgacatatgagttctttactgatgactcctcttctaatgcttgtctgagaccaggtttctctgtgtagccctggctgtcctggaactctgtagatcaggctggcctccagctcagcgatctgcctgcctctgcctcctaagcgctgagattaatatatatatatattaaggtggggtctctctatagccatggctgttattttaagttatgcatatgcatgtgtgtctgagtgtgggtttctgcctttgagtgttcagtgctgtagaagttagatccccaaggagccagagctgcgggcagttgtgagtgacttcacccagtgttgggacctgaactctggctctcttcaagagcactgatagcttttaactgctgaagcatctatctcttcagcctcagaatgcctaagcgttactggccaaggagaaagctagtgtgcatataccctataatttggttaaccattgttctcttgttggacattcagaacgttttcaatattgtaaacagttttattttagttttgagagacagagtctcactcttggttcaagctggcccagagctcactgtgtagcccaggctaatcttggactcctggctgtttttcctgactcgaactttgagtgccagagttacaggcctggtcatgtactgtgggaggccagaggactaccttaaacagagttcctcagattctgtccaccatttttctgtgtttggcaaggtttctcactggtctgcagctggggtaggtgcttgatgaccaatgagccccagggacctgcccttccccccccccaggctggggttatgggattgtgccctatgctttgttggtttgttgttgttttttgtctattttacatgggatctggggaatccacttcagttccttctgtttgcagagcaagcactttgctgactgagccatctccccaggacatttgtgaaaatggcctatggtcctaagagatcatggtagaggagtaagcatcacctgcttcttgcccttttgggagggaacttaaaggtcactaaaagttgctccattcgtgaatgctcttagcaaaggcacgagcagtttcccatgtccccagtagtaggaacacacatctcctgaagccagtcaatccatatttaggaagttattttgtcagtgagttctgccagggctgaattcttcttagttcccactcttgtcacttgtctcagacttggttcctgtgccaagtcttctgaaaccctgttttgcccaggctcggctgctctcgtcattagcccctaatcagtacctaataagtaagaagatagcccaaatggccacaatctgtaattcaaatttaagtctacatggtttctggtaaaaagcaggcctttttgttttattactgtggtaaaacataacacggctcagtattttttatattaatgatctgtatgtgtacaattcagtggtattcaatgaattcataacattgtaaaaggatttatagtgtctacacccaccttttcgtcaggcttgtctttgcccgttttctgttgctataacaaaatactcgaggccacacagtgtataaagaaaagagatttatggagctcacagtgttggaaagtccaaatttagggagccacatctgtttggcctttggtaagggcctcaagctggatggcaccacagtagccggagcacatgcagaccgagcaacctatttagccgaataggaagccagagagcctgggaggccgggcagggttcttcttttataagaaccctctctactggaactcattgcaatcccttaaatgccccattaatcctttctgaggctggtaaccctagtcacctaattacctcgtgttagactcctccttctaaaggttccactgcctctgacactgccacagtggggaccaaattcttaacctatgagcctttggggacacattcaaatcatagcaatccataaatccaaactctagagttagtaaatcataacttcctagtagtctctcttacaaatttcacgggagtttgcctgttcgtagtggaagacgttggtgcttttcctatggtgtccaaaggcagacctctgtatcctgcaatgagctttgccctctgtcactatgtgctttgtctacctaaccctcctaaacaagctgggctccaaaggttgccacactttaacggagatctcaggggttttgattgtttagtcaaagaatccagcagacagggcgagacaatgtatccaccctttccactctctattccttttaggcaatttcttcttctgttccttcccccagattcctttaaaagaagacccgagagtagagagtctgctcctcccctcccagtagcaggcactctggtccccatgctgtttgtaagctacatgtctctattatttctctaataaatttgatagcaactgttagcttagaaagaatgatctatttctttaaatcctgaaatttcaaaccacgtattagcatcgattccttaatctttccgggcattaaaaataagctcaaggtttaagtacattatgtgtagctctccatttgccctttttcatctgttggggaatcagatttgaacccgatcattcgactttcccagtgtgtcttttggttaacagccacttagcaatcttaccagtaaatttcctagcacactagcctgtaatcgtttttcccagtgtagtttttatttttattatcacatagtaactggatgagttcatgggatttggagtggtattcccacgtgtgcatacagcgtgccttggctgtagctcccacaactcacccctgcatccacactctgtctcttccacccacttcctaatcactcttaactgctattcgttctcctcattaggtttactggtttcagcttccatcagtgacagaatgaacagtcctgtccttccagccccactgtgtcacctccccgatggtccttctctgtgtgtgttatctaaagatttatttacttttattctgtatgtatagatattctgctgcatgtactttctgcacacagaaaggcagccaggtaactgagtgcattacttgcttctgtttttacttagccttttgcagcctgctttccggaagccgcagctttactgttgcattggcaactctgactttcctggatatcaaaagtattaggatagaagcttttttgtgtgtgctgttgttggaacagagttataagttttgaaatgttatcttcaacctatatttttaatatattttaaattcaatttttgagaatcttatacctgcaaacaacatattttgattatattcaatcccagttcttctagtgccttatagataaaatattccttttctcttcttttcttttcgtttttctttcctcttctcttctcttcttttctcttcttcttcgttttttgccattcttcttttcccccttgtaaaaataatctactaagttcaattagtgctgcccatacatgagtgtgtacaggaccatccactggaacatagtcaacttttgatctacactttttttttgaagtttgacaagacttcataaagaaatgaggcaacagatcccaccagtatctgtattctttgcagattttaagttttcaaacaacctaaccagttggataggttgttttgccaatgtacaatttaatagctgggtttttccccccagtagccatcaaaccatgaaatgtttaattcataagggcttatttttttttgcactaatatttactcagcttgaaatatttagtgtaaacaatgtatctgctgtgtccaggactggcataggttggaaggaaacactgctgggggttgataaacacgttatctggcaaatggagtggagatcttggagaatagtgggttgaactgcccctctggtctctgggcattatcggatacggtttgcagaggcagtgagcattgttgtggggaagctctgccctggctatgctgtcattgatttcatccaagggtccagagctgggttttttttttttcttttttctccaagttgcagttcccttggttacttcctctctgaagaaacaaagttgccatccagctgaaacattaactttgccagactttctgtctttggtttggagtatgcaatccgatggaactgaggtttctcatcacaccgcttcctgcttctgtaccagcactgtatacttagtaacgcatcacccacttcttccacttggccataggtcagttcctatctatttcatcaatagtttgttttctgggtttgcccacataatccttatctgaatgcctcttcatcatccttaccaccaaagtgcatgggccttcaccaggtgatttactctcctgcttgtgcatgatattttgtaatataaccaaatcccagcactcattaggaggttgtatttttgatctatttctcaagttcttgtgctttgtactgctttcaagaccctgtcataagaccccctgtcatacttaggttctagtgctgtgaagagaccaaggcaactcttataaaggcaaacatttaattgcagctggcttacagtttcagaggtttagtccattatcaacatggcagaaagcatggcggtgtgcaggcattcatgaagtgggaggagctgagagttctacatcttgatccccagcagaaggggtctgtcttctgcaggcagccatgagcagactctgattccacactgggcagagattaggtttaggagacctccaagtctacccccacagtgacacactttctccaacaaggccacacatcctaatagtgccattccctgtgggccaaacctatttaaaccactacaaccctcagccccagagaataattttggaatctttcccttatagtgatctcagggttccaactataccattttccccccaagacatgactgtaaacttttatagtaactggccttatgagtgtatatgatcattgctattttgaaattcaatttaaaatcaagctaatattcttgaagctctctcactgcccttatgggacatacttccctatctaaagttcaccactgaattgcccaatagaatcaagcaggaaatgacatcctattcaccatttacctctttgcagtaacccctgtgaaagggttgttcgaactccagaggggtggcggcctgcgggttgagagctactacagtagaccatcaggtggggtatcaagcctccaatgtgagtttttggaagtttggtggatatttgaaattcaaattataacaacaggcttccattgagagactcatcctcatcctggaatccaacactttcattggctaataaagtagctcacaagcgaaaactcataacccattttcttagattatgataaaccactttccaaaataagcaaaacacttggcttatatgcttggtgatattctgttttcacgaataagattttcttgttcatgttgaagatttttcggaaataacattgatttttttaagtctcatggagggtgccttattcatacccagcgggactaaggatagacgttgagtgcacagagttggggtcaaggtgagggctaactctccccagtcattatccctgttttgaacgtaagctgcccatcaggcacatcagcagacagccgatagagaaaccaatttcctctgaaaatggctattggcatatatctgagattcaggttctccattaaatatgcttataaagatcgtctgcaaacagatgatgaaattcaaggctcctgttaatttcataataattccctgttatgatagaggtttgctctaaagctaattttttttttgtattttataatttaccacacgcatctcttcttttaagatggaaacatgtagaaaggactttaaaaatcacttttgtacatcttagccattctgactggtgtgaggtggaatctcagggttgttttgattttcatttccctcatgactaaggatgttgaacatttctttaagtgcttcttggccattggagatccctcagttgagaattctttgtttagctctataccccatttttgaatagagctatttggttttctggagtctaacttcttgggttctttgtatttattggctattagccctctatcagatttagaattggtaaagatcttttctcaatctgttggttgcctttttgtcttattgacagtgtcctttgccttacagaagctttgcaattttgtgaggtcccatttgttaattcttgatcttacagtacaagccattggtgttctgttcagaaatttttctcctgtgcccatatgttcgaggctcttctccactttctcttctataagtttcagtgtctctggttttatgtggagttccctgatccacttagacttgagctttgtacaaggagataagaatggatcaattcatatttttctacatgctaaccgccagttgagccagcatcatttgttgaaaatgctgtcttttttttttccactggatggttttagctcccttgtcaaagatcaagtgaccataggtgtgtgagttcatgtctgggccttcaactctattccgttgatgtacctgtcagtgtaccagtaccatgcagtttttatcacaattgctctgtagtacagcttgaggtcagggatggtgattccaccagaggttcttttattgttgaaaatagtttttgctatcctaggttttttgttaatccagataatttgcaaattgccctttctaaatctgtgaagaattaagttgaaaatttttttaaagatttctttctttatttatttattcatttattttatgtatatgagtacactgttgctgtcttcagacacaccggaagagggcataggatcccattacagatggttgtgaatcaccatgtggttgctgggaattgaactcagaacctctggaagagcagtcagtgctcttaaccactgaaccatttctccagccccctaagttgaaattttgatggggattgcattgaatctgtagattgcttttggcaagatagccatttttactatattaatcctgctaatttgtgagcgctcaacccacttgtagccatatccctggttatacttaaggagcatgcgcaacaggctccatctgtaatatcatttagcataatctttagcaaccagagtaaagcagctagtagagaagggatgtgtcatatccctgtgtaaccctccttctgggatctgaatccacaagatccatggactctattccagattctttaagtgaaagtggtaacatttcagatgtataggtttcctaatttagaacaaggcttgtaggagctgggaagggagaaatagcaagcaccttccagtggattttgtttgttggtttttctcctttttaaaagccctgccctctccctttccctttcctcccttcattgtactgaatccctgagtggtttgcgtatcatcaagtgatgtcatgttgataaactctgtattggagtttcccataacgagaaccagaaaacaactgagacggaagaaaggctcatctgaagggtgtttggatgcctcttctgctgtgtctgcacttatatggctcttgagcctgctgagggaagcaggaagtcccctcagtccatctcagaatgaacagcagaacgttggagagttcagtgttccctctttatacatgtaggaagagcctgtcacagttttacaaagattattttgtctagtaactgcacatgtgagtatacctgagtgtttttcctcctagaatgagaaacattcaattactctataaactgtgtttaacttgtttattaacgacttgccttataagtgaataagaaattgcattactgtcacagaattttaaagacaataggaagtcctctctcttggaccctacgaagtcaaatgaggctatgctaatttatgctaactacaacagcataaactaatcgctgtgctttcaacagaaaaacagtctaaaataaccagtcagaaattgctttctttcctgccacggaccaccccagtcgggtatggggttccctggaatgagggtccttgaagataggtgggtaaggatttggtggtgacaaacagaaacacagaggcagtttgaatctgagtgtattctgcagctctcaagcaggggattttatacattaaaaaaccaaacattacatctcttagaaactatatccagtgaaacaatcacagataccaacaaaaatcatttggcacagtaaagcacaaaagtcatccaagcattacaactctgaaactatgtagccagtgaatcacaaacagaacaggtaacatcattataaatcatcaaaatataacaattctaaaaggatgtattcagtgggggctgccgtccaaagctagtggcatatttccaggagcaggttaataaatctttaatggtcagtgcttttaaccactgaactaactttccagccccatggtcaattattatttaacatctagtgcctgatttttttaatattcttcaatgtataaatttaaactattttaattctttctaattaaggctttctttaccatataccaaaatccacctccgatgacacacgtgtagccatatgaaattttattgttgggaaagtttttatctatcataatagttttgtaaatgatttagaaagtaaagcgttggtttccctggggatgaggtcatgttagtggccccatctctagggatggtttcttacccattattctcgcataaaaccttggcctaggctcccaggaacatgtaaataagaaaaggaataagagaaaacaaaacagatagattgccatgagaactacggctcaatatttttttctccggcgaagcgtcccacaaccggttccaggaggcctcccccttttgaggtcgatcgcctcagtctggggaacttgtcacacagatcctactggaggtggtgtgacactttcctatattttaaagctgtattgctgagtgatgtgagaggagtttttggttttcctcaatgtgaagaaattaaagagctctgagtggtggctaagtctgctaaagtaatttaaggaaatttgttccctaaaatatatctttttatatgatcactcatttcttcaaaaaccaggctgtcgatgggagactcttggccagtcttggggtccagccacacttctggggtcttggctgcccaggctctcttgctagcactggctgtaaatagccagtttctcatgctgccccataatgctaattagcatgacccctcatcatttcctgtcttctgcatctagagatcctgctgcattgttttctcctgatggaaaggaactgcacccctcacatctctgtatgtctcttcannnnnnnnnnnnnnnnnnnngacctgtaatatggcgagaaaactgaaaataccccccccccaccccccccttgctcctctgagtcattgacttcccgaggaccacccaggacttccacaatcctccatcgccaacgtttatgttttctccagatgagagttttatattgtttattttcattggtctgcccaccaccctgtacctggctcttttttttttttttttttttttttggtgatcatattactaatggcttctgtttgtgaaatctcttttctctgacttcttcctcgtggtgctggagaagacaagccatcacctcacttactgtagcgcttggttttccttcatcttctctccccagttttccttctccagattgggaagtgtgaggccattgttggtcccttcactcccttcctgcctgcctgcctgtctgtctgtccttttagtgtcactcctgagagcccactgtgcactcaactcttacaacttactcttgcacaattttcttctgaacctaacttaaaaaaaaaaacccattcacctattggacattttctcctaatatttcaccttctaaaatacttccaaccaattttagttgattcagcatcttctcagtgctatgccgagcctagaaatagaaagagcagtaacttttatcagtcattctatgttaaatatattttatcttatatttcgagacagagattcatgtagcctaagctggctgtaaacttcccatgcttcctgagtgccgggattatgggagtgcactaataaacttgggtttattttgtgctagagaactagcccgtggctttgtgcatacatcaccagcacaacagatatattttaaaatacatccccaggagctttgtgaattctccaaaaggaaactttaaattctatgtaaaaaggatggagaaagcttatgggcagtaagctatgagtggaaaccccgagtggaaacccctctgggagaagaggctaggagaacctgaaaggaggtgacatattttagggataggaacctgggtgagaggctcacgctcttctgggagtagacaggaaagggagcagtcttgactctgtcacctctctgtttttttttccatcagttccatctgcctaagattttatttttctccgtgtttgccttctgttacccccctgggactgcaactctcctctgaacgctgagcctttttttttttttttttttaaatagcgcttacatggtgtccagtttattctgccctggacaaacttcacctttgtaccaaactcttctttagaattctgtagcatctagttctactgcatataatgagagcttaacacttgccttgaatgttgaacgatgttagtctgcaggagacaggcaaacttctcatgaagtccaaacaacacataatccttcctggggaaactggcaatcgatttgctacagaagcagattagtcaatggttgttcagtggtgtaacggacccaagtcgtgatataacagcttcaaccagctctttaagatgctgtttagcaactgatcttgggatgctgttcacgattactgggtagaacctaagactcggtgtataaagttgtgtgtgtattgacaactaagtcctgttgatattctataatttcttattgacaagaagtgtgccttaacttgagaagtccatcatagttgctacattttttaatgtaaaaggctagcagaatttaaatacagtggcttcgtgatgtccaaacaacccctggaaagctgaaaaatgtgtccgacgggcattgctatttgtgtctcagcttggccttctttttacatttacaagaaaaaaattagttttgattagaaagaaagaaaagccataaagacaaataagagaaaatggagaggagaggagaggagaggagaggaactgcttctaatcagctataacatgagacattttaggccatcctgtctcctccctctgctccagacagcccaccactacatataaattctaatgtcagaaattctcttgaattgtcttttatctgtttttatgtcattgcccaactttgtgctaaataatacccttttagtagggttactgcaccattggcttccctaacacttatttgtgtatgtgttccccaaactacccttgatatgcctataaaatttgagcttgtgacttccccattagaaatcaaccttattcctgcctacctccgtagcctcatctctctactctcctcctgattacaccattccagactgctcccaagcatgcatatacttgaagcatttgagttccggctctttttcaccatcacgatgcctccggccctcctgcagagttagatgcgcctggtatttgcgccagatgcgcctggtatttgcgccatttacttagtatatgtatcctattgcttagttctcgtggtagttgtttagagtgagtgagcagtctttggctccactttacaggtaagagaaaaatgaagctcaaagaacttaagcaatattccaaaggtcacacagtaggaaacggtaagctgggattgggaccacattcttcaccattcacaagccgtgctcacacctctcatcaccttgctcagttgtgttagctctcacaacaccatgtttccttcaccatggagtgccattgcttgcctgttcttcatttacactattctcacagacccacctttcgtcttgacatcatcatccattaccatggtgtctagttcccaaccctaagagggactttcttaagtagaaatgagacaatgagtgttgtgtgacctccatagctctgagaaccttggtttctttatttgagaatatgtttaatattcacagtgggcataagtgttgttgttgttgtgatataagggctgaagaatatccctcaaaatggttcccagattctcccaacattaccttatttggaaaaaaaattctattttccagattcaagatcttgagatcaaagtttgggtgtagtaattagcatggtcatgtattaagaagtagaagcaggaggatcagaagtttgggtcattcttagctacgtaaggagttccaggccagcccgggttacatacaatcaaggctcccaaagccaaaacaaactaagcctagccttgagatgagattatttacataaccacatgaatcccgagaagagaaaggtagaggaagggggacagacctgtacccatgtgctatgcacacagaggtaacatgaagactgaggcagaacggagtaagacacaagtcagagtgacagctgtcaccaaatatggaaaatgtgaaggacaggttaccccttgcattaaatatgccattgccttgatttttacccccgtgattctggcttagatggctgacttccagagcaaaggaagaacatgtttctgtcatttgaaacagctaagtgtgcttcatcgcatccgcgacagggaacaggcagcaagacgcaatagtatgggagaccaggttgagtgtcatttgctttctcttggaaagttctcagcttccacttttcagtgtatcaaagagggagaggatcttcccctggactgttggaatttgtgagccctcgagtctttcttcctcagacgccagcccgtcataattcaggcagagcatacttgcatttcttaagaatatacactacactgcctttcactacctcgtgatggaatctgggagcgcacttgtatttgggtaggattggaggacaggttcatgtggtttagtcaatttagcagaagtgcaaacctttaagtagactaagctttcctatttgtgtgtcagtcacaggtgtaggtgggagtccacggtagctgagtgtgcttgttactgtctgttcttgtgatgagaccccacaacaaaagcaatttcaagagagaaaggttttatttggctacaagttcaggtcatagttatcattgcaacaaagtcaagacagggacctgaggcagctaatcacatccacagtcaagagcagagagaaaataaacacatggatggttacttgtgctccgtcccctctacatttgcatagtcctggatacaagcctagagaatggcactgcccaccttcagtgtggatgtctcctcctgcattaatctaattaagaaaaatccctcacagtcgtgcccacaggccaacttatctagatgttgttcccatttgagactcttctcaggtgattctagattaaggcaagtttacaatcaaaactaaccatcacaccagtttctctcaaatctgaagctctgcgacctctgccctgggttgctttcaaagaggcatttgtgggctaagcagaattaagaggccaccgaaagtttttcaggatgcttttgtagggtacttccaaatccatcttaaaactttgtgttgatcgatgttcatgttcccttgcacctgagcagtagtctacaggttcagcatagtccccacccttccttctctgctctcaggcgtgacttggggtagctctgctgctctgattcacttaacctggggtcttctcaggatcacagctcagcagcaacagcaggctgcagactgaggtctgcaacaaggcaggggcaccgtcgagaacgtcagcaggcagcagagcagaccgtcactagagacactgggtctgtgaagctgaagtaatatttatccaaaacagctgacctccttctcataaaagttcaaattatactttgggctacaaggaagctctctctgagctcactggtcagccacatccgtggaaaccctcacaagctcactgaccttggcccttctccagggctccattatggcagggtgtgacgctctagctggactgaacaggaatgctctgaggctggaaaggacaagtgggctgggtctctggttccctgggctcctgggaaaggagctgctaggctcagtacagctgaagggctcccatctgctacaatgtggatctacctcaagtgatgaagataacagaggcaagacgttcataggccttgaaaactcacagatggacttgtgtttcctttctgagtcattctctgtggaccattaagcgatgatcttataagatcaccgttttctggggatctcataagaaacttgatgtaggcaaacatattgaaactcagcaggttcagccatttgattcagtgagtaattaatcgtccccaggtcactcctgcccaggtgagtgagttcttgctggaacctatgtccaagacttattaagaagtatggtgtgaggtgagagagctaagatggatggagactaaagcaaagcacaatgggaaacgctgtcctggttgaaaagccttgaagtcaagagtcacagttctcctcatttgtccttctgcagagactggattgaatttgagcttgagtaagaatggatttgagaagatgcaaatattatattcaaaagccagagagacacaacattccagtggtcctaaggctgacttcttgacagtgtatgaagtggccatgtacaaaactcttactggaaaccaggatgagagcgagaacaagaagggcaaaatacttcacaatgtgtggactcattatgggttaaaaaaaccaaacaaacaaataagcaactggtgggtaaattccaagacccaaatgtaggcacaccaattgaatcattgaatcaagggtcttcaaaatgttaacctaagatctagagcaaaacatgtctccttctccaggaactgttaagtgccaacagctcaacttgagcctactggcactatgtttagtaaaaattccattccaagaatggctcataatgatgcatttgaatgaatttctttctaaataaaaccagtgtttgggggcggaaacaggtagattgcaggggttcactggccaacaaagctgaaaaagaaagtcccgggttcagagagatcctctatctttaaaaataagatggggagtggttgaggacaacacccaaggtgacctctggccttcctatgtgcatgaatatacatgtgcactcacatgcacataccacacacacaataataataaaattattttcatttacattatattcattacctaaagtgttttgattttctttctagtttcacaacctacataaacacaaatacagatacatatgtatatttaaatttaatatagatttggcatatgggagaagagtttcagtgtttgcctttctctgtctggctcttacttaataatgatttctacttctatccattttcctgaaaatgtgatggttgttttcgtcaccatggaataaagttacatgaatatatactacatttcctttaccagtttgattgctaatgtaagatggctccatttcctagatattttgaatagtgcaccaataaacacagatgtgtaagtatctctatggtatgttgacttagagtcctttggatatatacccaagtgacatatgtgggccatatttaaaccagacatttctgtgttcaaactatacacaaagtaagattcaagtcctgtcctgatgtaatagagatataaataataataacattaaataggtgctgctgaaatattgatggaaatagtcccagatgcaaaagtcaataaatctaggttatggtcttgagtggacctcttgccacaaatgtgaatttatgagcactagttttttcctacgcccaggggccctatggagactcctgtttgaaactgtgagcatgaaattatataactatatggaatgtgaccaacattacctcctacttatagtcagagaagggaatggaaggcatggagaggtcaagagaggtcatgtgggtcccaaagggctcgtggaagatgcagcgtttgggagaggcctgaacagtggatcctctgggcagcaaatggacagtgattaccatctgctgactgaatagactttgaaggatgggctggactcccacaggggtgctgcccggacctggggacacatgggtcttgctggcagaatagtttgacaggggattagggaattgtgtggtacaggtgaactggttctcaagcgagtactgactttccctggtagactagggagtttgtgctcaatggagtcaagccactctttcatgtctctgtctccattcatgttttctggactattgagagtttatgactccactttccaccagcgatgtccatcctttgcttggaaagggctttaggcagtcctgggcagagataaagaagtcttttattatatagtaacagacaatcagcatctctctcagctactttcctggaaaaaacccagctataaggactgtgctgtatagttttatatgtagaggtgcaattaagagactgccttcctaagactgggctgcaggcaagcctgtagggcattttcttaattagtgattcatgggggaaagcccagcccactgtgggtggggtcatcccctaagcatgtggttctgggttctctaagaaagcaggctgagcaggtcagaagcagcaccttccatggcttctgcatcagctctggcttgagtcccttcccacttcctttgatgaagaactgtgatgtggatgagtaaaccctttcccctcagttgctttgatcacagtgtgttgtccttgccacagcactagtaactctgactgggacactgaccctggaaggaagagaagtagactagcttttcctccatatccaaatccaaaaagtcaaatatgcaaaaagggtaaaaatcacaaaatttagatgaattgaattgacacattgtatccaccaatgttcatgtcttcaaaccatggctttctgtgcattttaggttgtctcaagaaataagttaattaataattaattgttgttttgtttttttgagacaaggtttctctgtgtagccctggctgtcctggaactcactttgtagaccaggctggcctcaaactcagagatccacctgcctctgcctcccaagtgctgggattaaaggcgtgcgccaccactacagaggtagtcaaacttattttttagaaaaatggacaataaggaagaagataaagctcagaggatcaaagccctggccactcaggcgggcagctggagtttgagctctgggacccacatagtggaaggggagaactgactcccacaagtaccccgacttctacattcatgtacactaacacatactatacacacacacacacacacacacacacacacacactttcacactcacacacacagttaaaaaacacattcttatactttaaactaacctagttcatgccttattttataaccagcggttccattttaaccatcacacactcctgagagagagagagagagagagagagagagagagagagcgcctatccagcaatagctggggtgttgtcatttctgtatggagagggcactaaagaaagaactaaccatggggttccgtggagcttactgtgtgtgacctcagctgcacgtgccccagtgatccacatgccctgaggaaaactactcaccctgtcctatatcctggtgctcaactgacttctctcggctttgacaagtcttgattttcttctgggatttggcacctttgaaggcgttcctgtgttgcttggcatgagacaggaaacattctgctaccgagacatttgttctctctagtagatggcaactcaacttcctttacccattgtttaggtaggttaaaaacaattgagacatacaaagtttgcaataccaaggggcctctcttcccaatgatggtcgactaggccatcttctgctacatatgcagctagagacacaagctctgggggtactggttagttcatatgttgttccatctatagggttacagaccccttcagctccttgggtactttctctaggtcctccattgggggccctgtgttccatcctatagatgactgtgagcatccacttctgtatttgccaggcactggcatagcctcatatgagacagctatatcagggtcctttcaacaagaagtgggagtgggtgggtaggggagcagggtggggggagggtatagggaactttcgggatagcatttgaaatgtaaataaagaaaatatctaataaaaaaaacaattggaggtggctgtagacaatcaaatcagggtcttggacatccttccaagcttggtccactaatactgaacttactcagcaactccttcttcatacctttctactcatactatggtttttcacttcagtttggaatctgtgagtttggaagactgtgaagtgtccattgagactaaccataaacaaagcttagagtgacagaatgaagaacagctatgactaggtttgtgtgtgcacgaccatattctgatggcaattggaagacgggttcattgtttacaagacaggctctggaactaggggttgtatctcagctggtagcatgcttgcctacacctgcctgaagccctgcgtaggcttgatccccaacactgcgtaaaaccggtcatggtgggagacagaggaaggaggcagagagtcagaagtccaaggttgcctagtgtgttccaggccagcatggggtacacgagacccctccttttaaaagcacattccaaatttatagttgcccaaattagaagaaaagtgcatctaagaaacaatggaatatattagctaaaatatggccatgggccagccttgcttttgctaaagtacttctctctctctgtctctctgtctctctgtctctctgtctctctctctctgtctctctctgtctctctgtctctctctctctctgtctctctgtgtgtgtctctccgtgtctgtgtgtgtctctctccactgtattgtatgcacatgttgcatgcatacatgttaagtgtgtctctctttgatcactgtttaccttaattacatttttaaaagattaattttatgtgtatgtgtgagtccttgcatgtgtatatgtaccacatgcatgtgtgttgcctgtgaaggcaggaagtgggtgtcagacctcctggaactggagttacagagaggtgtgagctgccacgtaggtgctagaaaccaatgtcagctcttttgcaaaagcagcaagtgctccctagctgttgagtcatctctccagctcccgctgtccccacccactccgagtttttgagacaaggtttctcactaaacctggatttcattaattcagttaaccttgacatccacctgtctctgcatgcctcctgcctctccaaacgtttgagttatatagatgtgttctgctggacccagcttctatatgacacctgtgctaaagtcttcatgcttgtactccaggtccttcacaaactgagccatctccccagaaccacagtccctcctttattagagagagagtttcatgtagctcaggttggccttaaatttgctatatagtcaaggatagcctggaactctttttttttttttttttttttcctgaaacagggtttttctgagtagccctggctgtcctggaagtcactctgtagaccaggctggccttgaactcagaaattcacctgcctctgcctcccaagtgctgggattaaaggcgtgtgccaccacgcccagcagcctggaactcttaatctttctgcttcatctcccaggtgctaagatttcttgtatgtgctatgcctcgctcttttatttttaaaagaccaaactgcttgaattggcattgcatccctttgtggctctggttacttgatgcctgtgagcatgtgtcttaccactacaatgtatatacattgaccacattcaccttagcaaagggctctgccaggtgggaggtagatagatatactgactgtctatacacttgaatgttgtttctccaaattagtacatgaagaagcaaagacctgactatggaccagttaacagtctatttaatgagttatttgtgatgtttttgtctggtttgcttcccgatgtcccatgtttcataattaatatacatatattgttttgtattgaaatcgcttaacttatcctccgtgaattagtttcattcatctcagtttgagcttgctcatctcaggaattcccacactacagagtgtgccctacaaatagagatgtgggaaaccagccaaaggaaattaaactgtcgttcttctcatcttcccggctgaaaatgtctacattttatctatgttttggcagccatcactctgaactgagcagacttcatactgtctgctcagcggagtgcctgagtctaatctctgcagacttttcttcattgttcattacttgcgacatcggtaggtgtgagttttaccacattccctttactccagttgctgactacaaaaaaacaaaaaaacaaaaaaacaaaaaacaaaacaaacaaaaaaaaaaaaccagagtgaaattgggaacgaaggttaaaaggagctcagcaaactctatgtagtccccaagaggctgtgcaggactgtggcaccagggtcactggcacgagagtaaggcannnnnnnnnnnnnnnnnnnngacttgcaaactttatatgccccagtacaggggaattccagggccaaaaagggggagtgggtgggcaggggagtgggggtgggtggatatgggggacttttggtatagcattggaaatgtaaatgagttaaatacctaataaaaaatggaaaaaaaaaaaaaaaaagaaccaaaaccctaatcgaattgcaaacaaaccagctagtaaccaacaaactctgaaggagaaagagttgctatcactttctgtgacatttataaatatgaaatgcatattttctgttgggttaaatgtcagccttcagccttatcctgatagttgtatagtttgctttttttaaaaaaataagaccttcaatacacacatactcacacatatggagtttaatgtgccattttatattttgtatgcacttatcttgttctccatttactatagtagcaaaccagaatcaaacatttatagttagaccaatagtattgtgtaaatgctgcaattaaataaattaaaaattttaaatgcaaagcttgaatgatgttcctaacccacgttatttatttatttatttatttatttatttatttatttatttatttattatatttgcatgtaaataatttgcgcaactttctgttaggtatctgctataagcaggcccagtagtattgacttatattgtcggatcagctctccggatgagaaggaccacagaaacattcattaacactgaacgtttctgcagtagttgcttttcttgccttgtctgcatcctctgccggggagtttcatgaactctgagagagtccaattttaatcccttaaggaagccatctgtgaagcatggatgcccacggacttctgaagccttggcattctcatgcatggtgtgcaatagaccccaaagcaatagcaggctcaggaacagactagaatggaggccatgtgtcccaaaccaccctttaaccctgttgacgtttccctcaattttatactgctaactactgactgtaaagggcgtggctcttctcctaacagctatctgtcttttacatctccatggcatagctatacatttgcaatttttctcttacctcccatccctagtttaactcatctgatttaaaaaataattcgcagggcaaagaaagatggcccagtggacgaacattcttgcctctaggcctgacaaaactgagttcannnnnnnnnnnnnnnnnnnnagagactccttatggggctgaggacacttgtgaagatgaagtgatgccaccctgaaaagtggaagtggcactggggacagaaaaggtttcataggtagtgactgaccagccaaggctgagatcattctttggccacagtttcctgtgtagctgggaagctcaccagaagttgtgaggaaaacaggcagatagcttgatgcagggctacagactgggaaagattgcaacaaatgtaattagcttaggtaagaaggctggagttaatttttgaccaaggtactaaaagataagccagtggatgtgtgtggggtggggatgggagagggatcgtggctgtaatcgaacacactcaggaggctgaggcagaaaaatcactgtgtgcgcaaggccagtgtggaccttatagtaagaaactgtttcagaaacaaaaccctaatcgaattgcaaacaaaccagctagtaaccaacaaactctgaaggagaaagagttgctatcactttctgtgacatttataaatatgaaatgcatattttctgttgggttaaatgtcagccttcagccttatcctgatagttgtatagtttgctttttttaaaaaaataagaccttcaatacacacatactcacacatatggagtttaatgtgccattttatattttgcatgcacttatcttgttctccatttactatagtagcaaaccagaatcaaacatttatagttagaccaatagtattgtgtaaatgctgcaattaaataaattaaaaattttaaatgcaaagcttgaatgatgttcctaacccacgttatttatttatttatttatttatttatttattatatttgcatgtaaataatttgcgcaactttctgttaggtatctgctataagcaggcccagtagtattgacttatattgtcgaatcagctctccggatgagaaggaccacagaaacattcattaacactgaacgtttctgcagtggttgcttttcttgccttgtctgcatcctctgccggggagtttcatgaactctgagagagtccaattttaatcccttaaggaagccatctgtgaagcatggatgcccacggacttctgaagccttggcattctcatgcatggtgtgcaatagaccccaaagcaatagcaggctcaggaacagactagaatggaggccatgtgtcccaaaccaccctttaaccctgttgacgtttccctcaattttatactgctaactactgactgtaaagggnnnnnnnnnnnnnnnnnnnnaattagtttcattcatctcagtttgagcttgctcatctcaggaattcccacactacagagtgtgccctacaaatagagatgtgggaaaccagccaaaggaaattaaactgtcgttcttctcatcttcccggctgaaaatgtctacattttatctatgttttggcagccatcactctgaactgagcagacttcatactgtctgctcagcggagtgcctgagtctaatctctgcagacttttcttcattgttcattacttgcgacatcggtaggtgtgagttttaccacattccctttactccagttgctgactacaaaaaaaaaaaaaaaaaaaaacaaaaaacaaaacaaacaaaaaaaaaaaaccagagtgaaattgggaacgaaggttaaaaggagctcagcaaactctatgtagtccccaagaggctgtgcaggactgtggcaccagggtcactggcacgagagtaaggcaggtttcgccctgcattggagtagaatagcttttggttttgtttgcttgtttttggtttggtttgttttggtttttcaagacaaggtttctctgtgtagtcctgcctgtcctggaacttgatctgtagaccaggttagcctccaaatcagagatggtggaatagctcttaattcctgtttttaattccctctgattcctgtttgtttccagggcagagttccagtctgctgggtgcagtcttgggagccgggtagatgctgagatgacagaagtaaaagcccaagcacagtgctcagcagcagacatcgacctcgtagcatttggagagaacttaccaattaggtttcatctttaacatgatgactaagcagtgaccaaactagcccagttagccttgaccaaactaacccagttagcagtgaccaaactaacccagttagcagtgaccaaactaacccagttagccgtggttaacgtgctttgttgttaagggaaaaatgcaattctgatggatttaaaaaataagacctactttaaatggaaagtatcatacaaataagtttcgtttattaaaaaaagagtgcagagtgggagagagagagagagagagagagagagggtggggggggggtggaatcaaagatttgttgttttcaaaaaacaagtttggcatacacctaccagcatttagaaaaccagaaaaccagatttactatttatcatttgggaagtagaacattatgatcttagggtacttaagtatttaagtgagaagagaagcaattattagacattctaagttgcttcttgcaaagtgggtgtttgctataacaaaaacagtttctgtcacgatcacgtggtttcacgcaaccattttatttgggcaaatattgtgtgttttgtaagcagattattatactttggtactgatttttcgataagaaccttttttattataaaatgatgtatgtctatgatgcatacagttctgtctgaaaataggaggaacaggctcctggcttctggcgtagctgctcccaggcaagttctctaatctgtagctttttttttttttttaatttctctagagtcagtctataagaggaagtttatgttcataatgtttttatttttattaccgatacattttttacatatcgatcctcttttatgagtactttcccataaattactctcaatgtaacagcacatcttttactacgcatgattaaatcaagagataagtgtttgatgtgataaactttttatttgcttctatttttatatgacatcacaggagcagataaagtacccagttttatagctaagatatttaagattgggtgggtgagatgagtcaaggggtaaaggtgccagatgtcaaatcttaccacccaaattccacatcatgacccacatgatagaagacgaacatagaagactacaaattgttctctacatgaacacacacacatacacacactgtaatgtaaattttttaaaaattcgatgtactgaattttgagtggtctcagatgattgtgtatgcaaaatcattgctgttgtctctccatatttaaaatgtttcccatagattattatctaacaatttgcattcgtttgatggtaaatgtaaatggattttcaatataattctgttgcttaaaattttcacaaatcctacttttaaataaggattcttacatgctttaacctcccttctagcccactacccatgagaggtagtgagaaagtaaggttattaggatacaggggcagtggacctgtttagaaatggttcttttgcttgtcaggaaatcagcagttcagttcataggatttagcagcagcagcttgatccaccctcaaacacttcacgaacacaccagcagtccaatttaggaatgccggatagcaaacatgaatcagcagcgatggcatgactcagcagaagattaggatgagtcagcagaagcaaccagtgctagcagggacaccaggagaagttctctgtggtgcctctctcaacaatgtgaggagaccaagaaggtccaagaagtgttgcaaagctagccatgcaagcccccagtcaatgtccattgaattctatttatcatgaatattcaaacatcatgaatcctcccatgggtctttcctcaacaaaactccaggtgagtctgtatcagctgacatcattctgccaactggccgagtcctaggagcaacaccagttttttggtgcatttctctctatggaatcatgacaaatgatgactaataatcaatggtaaggcgtaccaataccacccagtgtcatcctctgtctattgggtccttcttaacaccatgcgtcctttcacatgtttgccttagcaaaacatccttttacctgtgtctgcttcagcgaaacgttctttgacataactgactttccaaagacaccagaattgcccacttcataattctttctcttttcctgatctttcttggttactttcttttggccttttcatagggccacaaaaggctaactgggatgcacttaatgtcgctgtgatcagccactcacaggctctgagttttgttcttaagacctttggtcctccatgttgcacattgcagtgtcctagtcccgatgctccatgggtgaaaactcaaacccacttcctttttatcatttgcctcattcccttcccactcatttcccttactttggtcggcatgacttacttaacatttttttcttttattgattattaattattttatttatttgcatcccaaatgttgctgcccttcttggtcccatctcccagagttctttccctcaccccccttcacccttgaaaagttacccctctccccatacccacctcctctgaggcatcaagtctctataggattaggcaattctatcccactgaggccagacaaggtagccctctgttacacatgtcctggggctttggaccatctcatgaatgctccttggttggtggcttagtttctgttcctggaagcttccaggggtctgggttagttgacttcctatgttgttgacttccaaactgttgatcttcctatggggatgctgccagccactacagttccttcagtcctttccctaactcttccataggggtcaccgatctctgtccaatggttggctgtaagcatctgcatctgtctcaggcagctgctggtagagcctctcagaggacagccatgctaggctcctgtctgcaagcacaacatagcatcagtagtaaatagtgtcagggtttggtgcccacccatgtgatagatcccaaggtgagctggtcactagtcgaccattccttcagtctctgctccatttttgtccttgaatttcctttagacaggaacaattttgggtaaattaatttgaaggtgggtaaaatcttagcatcaaagctatatatttttgctttctgtgcctaggtgcctgaatgagaaaaggctttttcaccattttttccttgtaagaacatttccttcaatctaccagttgtttttgagtatgtggggtgaacctttatttgggttattatttgtggtttgtacattagttacttatatggaaatggttgaagaaccggtgactcagaaggaattacccagtactgaggatgtttacagagcctgcttcccggggaggtgatgggcaaacagcctttcttcacctgatccccttacccagacaagtaccacagaggtcccccatgaaaaccagccaaggccagtatgagacagccactctcttcttctcaagggattctctctctctctctctctctctctctctnnnnnnnnnnnnnnnnnnnnnnnnnnnnnnnnnnnnnnnnnnnnnnnnnnnnnnnnnnnnnnnnnnnnnnnnnnnnnnnnnnnnnnnnnnnnnnnnnnnnnnnnnnnnnnnnnnnnnnnnnnnnnnnnnnnnnnnnnnnnnnnnnnnnnnnnnnnnnnnnnnnnnnnnnnnnnnnnnnnnnnnnnnnnnnnnnnnnnnnnnnnnnnnnnnnnnnnnnnnnnnnnnnnnnnnnnnnnnnnnnnnnnnnnnnnnnnnnnnnnnnnnnnnnnnnnnnnnnnnnnnnnnnnnnnnnnnnnnnnnnnnnnnnnnnnnnnnnnnnnnnnnnnnnnnnnnnnnnnnnnnnnnnnnnnnnnnnnnnnnnnnnnnnnnnnnnnnnnnnnnnnnnnnnnnnnnnnnnnnnnnnnnnnnnnnnnnnnnnnnnnnnnnnnnnnnnnnnnnnnnnnnnnnnnnnnnnnnnnnnnnnnnnnnnnnnnnnnnnnnnnnnnnnnnnnnnnnnnnnnnnnnnnnnnnnnnnnnnnnnnnnnnnnnnnnnnnnnnnnnnnnnnnnnnnnnnnnnnnnnnnnnnnnnnnnnnnnnnnnnnnnnnnnnnnnnnnnnnnnnnnnnnnnnnnnnnnnnnnnnnnnnnnnnnnnnnnnnnnnnnnnnnnnnnnnnnnnnnnnnnnnnnnnnnnnnnnnnnnnnnnnnnnnnnnnnnnnnnnnnnnnnnnnnnnnnnnnnnnnnnnnnnnnnnnnnnnnnnnnnnnnnnnnnnnnnnnnnnnnnnnnnnnnnnnnnnnnnnnnnnnnnnnnnnnnnnnnnnnnnnnnnnnnnnnnnnnnnnnnnnnnnnnnnnnnnnnnnnnnnnnnnnnnnnnnnnnnnnnnnnnnnnnnnnnnnnnnnnnnnnnnnnnnnnnnnnnnnnnnnnnnnnnnnnnnnnnnnnnnnnnnnnnnnnnnnnnnnnnnnnnnnnnnnnnnnnnnnnnnnnnnnnnnnnnnnnnnnnnnnnnnnnnnnnnnnnnnnnnnnnnnnnnnnnnnnnnnnnnnnnnnnnnnnnnnnnnnnnnnnnnnnnnnnnnnnnnnnnnnnnnnnnnnnnnnnnnnnnnnnnnnnnnnnnnnnnnnnnnnnnnnnnnnnnnnnnnnnnnnnnnnnnnnnnnnnnnnnnnnnnnnnnnnnnnnnnnnnnnnnnnnnnnnnnnnnnnnnnnnnnnnnnnnnnnnnnnnnnnnnnnnnnnnnnnnnnnnnnnnnnnnnnnnnnnnnnnnnnnnnnnnnnnnnnnnnnnnnnnnnnnnnnnnnnnnnnnnnnnnnnnnnnnnnnnnnnnnnnnnnnnnnnnnnnnnnnnnnnnnnnnnnnnnnnnnnnnnnnnnnnnnnnnnnnnnnnnnnnnnnnnnnnnnnnnnnnnnnnnnnnnnnnnnnnnnnnnnnnnnnnnnnnnnnnnnnnnnnnnnnnnnnnnnnnnnnnnnnnnnnnnnnnnnnnnnnnnnnnnnnnnnnnnnnnnnnnnnnnnnnnnnnnnnnnnnnnnnnnnnnnnnnnnnnnnnnnnnnnnnnnnnnnnnnnnnnnnnnnnnnnnnnnnnnnnnnnnnnnnnnnnnnnnnnnnnnnnnnnnnnnnnnnnnnnnnnnnnnnnnnnnnnnnnnnnnnnnnnnnnnnnnnnnnnnnnnnnnnnnnnnnnnnnnnnnnnnnnnnnnnnnnnnnnnnnnnnnnnnnnnnnnnnnnnnnnnnnnnnnnnnnnnnnnnnnnnnnnnnnnnnnnnnnnnnnnnnnnnnnnnnnnnnnnnnnnnnnnnnnnnnnnnnnnnnnnnnnnnnnnnnnnnnnnnnnnnnnnnnnnnnnnnnnnnnnnnnnnnnnnnnnnnnnnnnnnnnnnnnnnnnnnnnnnnnnnnnnnnnnnnnnnnnnnnnnnnnnnnnnnnnnnnnnnnnnnnnnnnnnnnnnnnnnnnnnnnnnnnnnnnnnnnnnnnnnnnnnnnnnnnnnnnnnnnnnnnnnnnnnnnnnnnnnnnnnnnnnnnnnnnnnnnnnnnnnnnnnnnnnnnnnnnnnnnnnnnnnnnnnnnnnnnnnnnnnnnnnnnnnnnnnnnnnnnnnnnnnnnnnnnnnnnnnnnnnnnnnnnnnnnnnnnnnnnnnnnnnnnnnnnnnnnnnnnnnnnnnnnnnnnnnnnnnnnnnnnnnnnnnnnnnnnnnnnnnnnnnnnnnnnnnnnnnnnnnnnnnnnnnnnnnnnnnnnnnnnnnnnnnnnnnnnnnnnnnnnnnnnnnnnnnnnnnnnnnnnnnnnnnnnnnnnnnnnnnnnnnnnnnnnnnnnnnnnnnnnnnnnnnnnnnnnnnnnnnnnnnnnnnnnnnnnnnnnnnnnnnnnnnnnnnnnnnnnnnnnnnnnnnnnnnnnnnnnnnnnnnnnnnnnnnnnnnnnnnnnnnnnnnnnnnnnnnnnnnnnnnnnnnnnnnnnnnnnnnnnnnnnnnnnnnnnnnnnnnnnnnnnnnnnnnnnnnnnnnnnnnnnnnnnnnnnnnnnnnnnnnnnnnnnnnnnnnnnnnnnnnnnnnnnnnnnnnnnnnnnnnnnnnnnnnnnnnnnnnnnnnnnnnnnnnnnnnnnnnnnnnnnnnnnnnnnnnnnnnnnnnnnnnnnnnnnnnnnnnnnnnnnnnnnnnnnnnnnnnnnnnnnnnnnnnnnnnnnnnnnnnnnnnnnnnnnnnnnnnnnnnnnnnnnnnnnnnnnnnnnnnnnnnnnnnnnnnnnnnnnnnnnnnnnnnnnnnnnnnnnnnnnnnnnnnnnnnnnnnnnnnnnnnnnnnnnnnnnnnnnnnnnnnnnnnnnnnnnnnnnnnnnnnnnnnnnnnnnnnnnnnnnnnnnnnnnnnnnnnnnnnnnnnnnnnnnnnnnnnnnnnnnnnnnnnnnnnnnnnnnnnnnnnnnnnnnnnnnnnnnnnnnnnnnnnnnnnnnnnnnnnnnnnnnnnnnnnnnnnnnnnnnnnnnnnnnnnnnnnnnnnnnnnnnnnnnnnnnnnnnnnnnnnnnnnnnnnnnnnnnnnnnnnnnnnnnnnnnnnnnnnnnnnnnnnnnnnnnnnnnnnnnnnnnnnnnnnnnnnnnnnnnnnnnnnnnnnnnnnnnnnnnnnnnnnnnnnnnnnnnnnnnnnnnnnnnnnnnnnnnnnnnnnnnnnnnnnnnnnnnnnnnnnnnnnnnnnnnnnnnnnnnnnnnnnnnnnnnnnnnnnnnnnnnnnnnnnnnnnnnnnnnnnnnnnnnnnnnnnnnnnnnnnnnnnnnnnnnnnnnnnnnnnnnnnnnnnnnnnnnnnnnnnnnnnnnnnnnnnnnnnnnnnnnnnnnnnnnnnnnnnnnnnnnnnnnnnnnnnnnnnnnnnnnnnnnnnnnnnnnnnnnnnnnnnnnnnnnnnnnnnnnnnnnnnnnnnnnnnnnnnnnnnnnnnnnnnnnnnnnnnnnnnnnnnnnnnnnnnnnnnnnnnnnnnnnnnnnnnnnnnnnnnnnnnnnnnnnnnnnnnnnnnnnnnnnnnnnnnnnnnnnnnnnnnnnnnnnnnnnnnnnnnnnnnnnnnnnnnnnnnnnnnnnnnnnnnnnnnnnnnnnnnnnnnnnnnnnnnnnnnnnnnnnnnnnnnnnnnnnnnnnnnnnnnnnnnnnnnnnnnnnnnnnnnnnnnnnnnnnnnnnnnnnnnnnnnnnnnnnnnnnnnnnnnnnnnnnnnnnnnnnnnnnnnnnnnnnnnnnnnnnnnnnnnnnnnnnnnnnnnnnnnnnnnnnnnnnnnnnnnnnnnnnnnnnnnnnnnnnnnnnnnnnnnnnnnnnnnnnnnnnnnnnnnnnnnnnnnnnnnnnnnnnnnnnnnnnnnnnnnnnnnnnnnnnnnnnnnnnnnnnnnnnnnnnnnnnnnnnnnnnnnnnnnnnnnnnnnnnnnnnnnnnnnnnnnnnnnnnnnnnnnnnnnnnnnnnnnnnnnnnnnnnnnnnnnnnnnnnnnnnnnnnnnnnnnnnnnnnnnnnnnnnnnncccagtagtattgacttatattgtcggatcagctctccggatgagaaggaccacagaaacattcattaacactgaacgtttctgcagtagttgcttttcttgccttgtctgcatcctctgccggggagtttcatgaactctgagagagtccaattttaatcccttaaggaagccatctgtgaagcatggatgcccacggacttctgaagccttggcattctcatgcatggtgtgcaatagaccccaaagcaatagcaggctcaggaacagactagaatggaggccatgtgtcccaaaccaccctttaaccctgttgacgtttccctcaattttatactgctaactactgactgtaaagggcgtggctcttctcctaacagctatctgtcttttacatctccatggcatagctacacatttgcaattttcctcttacctcccatccctagtttaactcatctgatttaaaaaataattcgcagggcaaagaaagatggcccagtggacgaacattcttgcctctaggcctgacaaactgagttcaaaacccaggtgatggaaggagagaactaacttccttaagttgtcctctgatctccaaaggtgtgctatggcacatgcatgcacacacacaaaacaaaggggcctagttggagcatgggacatgacctcaccccacgtcaacacacacagagacacagacacactccctggagtaccagagtgcttctctttctttaaagttttgaaggggatagtggacgttacgagctggtgtgttaggtcagaggcctgacctttccctccctccctggtatgtatatattcaggcgtcttactaatgcttacaaatgtccatttctgtgattcactatagtgctattgacgacaccaaactggctgtatcttcagagtctccctggactcatcttaagatgaaaacatgaaggtttttccaaagactgttaagatgaaagttaattaaaactaagttagagtatcaatctcagacaagtagctgatgagatgaaagatatgttaacctgcttcacagacaatagcgctattaggcagcacatttataacctggacagttcttcatctgtaagtaattgcctttcttgtaatgtttgcgtcctttatctggagaccttcatgtgttctgaaaggatgccattatattccctttagcaaagcagatgagcagatggcttccacatctgcaaaaatgtgttctagagataaaataacttgcttaaggtcgtattaccaatcagtggtggaatcaaattaatagtgtttggacctgcagctttctcaagtagattctggtgacactgtaagcccagttctgtcagcaggaatggaatctgctccgagggaaggctgaggctctgccctgtgataagaaggaaccagcccttttctgttgcatttgaaaccttcaggagcctctcatttgggtctcagtgcccaagctccatgggttcacagagacagactcggtgaagcatctaggggaactcaggggaaggcaaacagatgacagccagaattctggtgcatagaaagtcacaaaaggaatacaccccttttctgcacccacccataaagcctcacctattcccaaaggtgatttacttgtttgtttttgctttttgggacagggtttctctgtgcagccctggctgtcctggaactctctgtagaccactctggccttgaactcatatagatctgcctgcctctggatcttgggtgctgagatcaaagttgtgtgccaccaccacccagtaagggtgactatttttaaatgttactctttgccatgtagaaatagcaattcccttttccatatccagatagcccttcgtgtactccaaactttcaatacatacaagtgtatttatttatgtactaatttagtgtgtgtgtccatacaaccttgtgcctttatgcttgtggaggtcagaggacaactggtggctcttttctggtcctaccatgtgggtctctgagatacatctcaagttgtcagtcttggaagcaagtgcctttaccaatgagctatctcatcagcccaagaaacaatattttaagtgatgatctaaacttggtgtagtgacatgtgcctagaaggaggattgtcaatttgaggccaacctgggctatacaatgaactctaggccagcctagaatacaaaatgaagcttgtctttaaaaataaaattgtctagtctggcttgcaaaaatctgcaatgtgtctgaaaggattagtatacatgagtgaataatatgtaatcatgcatacaatattagttatatgtaatagccatttacagctcttctgtgattgatttataaatatgcatgctataaatacaccttccaagttactatgctggaaagattttcagtctgccaccattaatggcaggcaggatctcaggtagttggggtgatagttttgatttgtcattaactctatagctatgcaacagacacctcttgttgaaaagttatgggcaggaatttgagaacctgctagtgatgcatctgtaggcaaatgacaatgtcatatgattcagtggcagtgaaaaatggtgtaattcctatgaggttaatgtgtccatgtcaattaaaatgacatgcaattgcccgtggattatcattccattctgcaaatttatccattgcagtttgtatacctgtgcgtaggaacaaagggtccctgtaatctgcattccttataacagacagcaatctgcaggcatcagcagcaggtggctgattaaagttgtatttctaccttagactgtatcattgtagcctggaggacctgactgtattttccatttagtagctctagggctcaagggcaagcagagctaaagctcagcccgtgctgtgttctccactcacgtggggctgggccactctttgctaccttgcactgaatcacaaaactgttagtctcataatcatcacaaattaattgatgttctgatgaaaatgcctaccatgattttccattgggcttgacatagtttgccatgaagtcattgggagaggaatatctaagaaaatttggagaacaaaaatatgggaagatatctttctccagaaatagaaattagtctaatattataatacttgagatatgttgttgatagttccaaagtcaacatttggccactagacagagcagaaagctccaagccaaacactcaagtatgaaaagtgtgtgtgtgctaatcaaagagcacacatgggctggcctgtggctcctgctacatatgtggcagaggactgactgccttatctggcctcagtgggaggggatgtgcttggccctgtggaggtttgaggcctcagagaaagggggtgctagaggggtgaggtgggagtaggtgggtaggtaggggagcaaaggtttggaggagggggtaggaggttcatggagggggaactagaaagggggggccaacatttgaaatgtaaataaataaataaaataattaataaaaaagaaatagaaaagtatgtgtgtgtttcataagaaaactatggagtcccaaaccatacataaaataagttccatgttgtgaaagacctttatgtcaaagcacttttaaatgaaaacacaggagactagccttgtgagcaaaagaggaaggaggggtttcctaatgtaggcatggcttaagtcttacttcatcaaactctacaacttttgctcaacggaacaccataattgaaaacacaagccacagattgggaaatgatactttcagtgtttatgtctgagaaggactccttcttaaaatttataaacaatgctcatctgtcagtcggaagacatatggcgagaggatacacattcatggaaaagaaaacgcagtggccaagacacatctgaagagatgctcaacttcactaacaagaattatcatttaccagttttaatagatgctattttctgaaaatttgggatataagttgctgtccccttggtgggaagcttggctatcttaagggccagtgagagcctcacactttgccctagtattctagatgaacatttagaggaactcacatacaagcagtcggagattcatgcactaatgtttacatcagcattgattgtgagggcaaaaaaggaaataagtaaaaggaaaaaggaactaaactaaactgttagagattccagttaaaacgaatatgctaaatcacagtctgtatgtatatgcgtgtgtaaatgtgtgtgtgtgtgtagcgtgttctgatgcatatctaatttccatttttgagtcagttgtttttaattttctgttgtattctagtagtctgatgcccaccctggcactagagtataatgctacctcaatggtgacaatggtagagtaatttatattataatattatatatacctgtatgcatatacacataacacaatgggtcagaaatcaggcatccttgacaggagttaagcctgtgaatatgcacaacagtgctattagttatgtataggtaccacataagttgtagtagtctcaaacagtttataggaataaacactaattccaacataatggtgccaagtgaggctgcagagcatgatggaacctacagatggagttgcaacattttgtttaaaaagattattagtttcactctggtttagtattagcattttatttatccaggcagactcaacatatatagtacccaacatactattctgtatgtcggaaatatctcataattaaggaaaactcaggaatacgcacacactgtgtcagtggcctgttccatgtatcttacatctttgctcgtataaagcgggatgcagaggagaggcaagagaaactctgctaaaacctatttccaacctgcagaagacacagttggcccacgctaatacctcttaaccttgatttgtgcaaaacaagtttgtaatcactagataagaaaactgacttaattagtgcctttcccatgggactttctagtaccagtcagcaactgcagnnnnnnnnnnnnnnnnnnnnnnnnnnnnnnnnnnnnnnnnnnnnnnnnnnnnnnnnnnnnnnnnnnnnnnnnnnnnnnnnnnnnnnnnnnnnnnnnnnnnnnnnnnnnnnnnnnnnnnnnnnnnnnnnnnnnnnnnnnnnnnnnnnnnnnnnnnnnnnnnnnnnnnnnnnnnnnnnnnnnnnnnnnnnnnnnnnnnnnnnnnnnnnnnnnnnnnnnnnnnnnnnnnnnnnnnnnnnnnnnnnnnnnnnnnnnnnnnnnnnnnnnnnnnnnnnnnnnnnnnnnnnnnnntagaatttactacagggaggcacttgacatttacggtgcttttaacttgttattaatctaagaacatgatgtctattaaatgaaatcagcggatggttgtgctgggattcaatcatgtgtttcaatcggttgtatctgattgaatatatatatgtagtataaagagttgtctcatggcattgtggaggatgacaagtttcaaaatctgtggttggcaagctggagacccaggaaagctaataaggtactgtcagcccaaatgctgaaaggctgcagatcctggaagagtccaaaggctggaaaggactaatgtccaaactcagagcagtcaggcaggagaaacttgacacttgagagaacaactcacccttacaggcacattcaggagagcagtgtccgagtcaggctaacacagcagtaatcgcatctcttcacactgctccttgagtgcgttctttttattaccaaggactgtttacattcctttataataaaacagaaatgtttgaattcctccataaacatcaatgtagtattaacagaggaaaatgctcttaacatcttggcactgattttttttttttaacaaagttcacaaatgctctattaccaagtagtgttgtgacctcaggacaggtaagctctttactggaaaaaaaaaaacaaaaagagcgggtggggtggggtggggatttgagactaccgtcatcatccattgagttctggagtctgtaaatttcacctgtgaggcctggggtccacgcagggctgatggcatgtctaccatgagaaaatcatttccaatttccatagaaaggggagggtgattttggatagtcttgtgccatctaaatagctaacactctgggaatttgagtgatttaagcaatctctctgtatttttcgggcattgtgggtgatccttttatgtgggttttcagttgtgtatgactcggggaatcttaagtttgattagctcctgtgctaagctgtgtcctaaactctcatcagtcaggttccattttgggtgacgtttgggttggtatcaggaaagctgactacagaaacttggcacctgctaaattcaagtagctgtgggcctgaatcattttggcaggtcttagattttataaattaaggcatgtgaaaataactttttttaatgagtgccctaccagcctcgtgaatagtttccaagtttcagctggtcccaggaatgttaggtgttcttcagagtttatcatgaagtttgcaactggcacttcctcattgccaccctacttctagataagcaaatataagcatgcctggtccccaaacacttaccaataaatatttttttacatcaatggcatgaattctatacatgaatgaatgaatgaatggatgaatgaatgactagactttctgtgttgggatgttgaactcaggaccctagcctttcagggcaaatgtcttttactagtaaaggcatcttgccagcccagcatagactcttgagagacaagaaatagaaactgcaaaacatatacttctatgtggagacaagaaaagtgaagcaagacaaagacggacatagttaacaaagaaaagcaaagacaaagtgtgtgagccacctaggagaggtgcagagaatttcctgcattagaaggggaatccaggagaaccacgaggctccgtttctggtgtgttttgagccaggcctgacttctttaatacgcatgctatgttcagttacaaggaatgttgtaacggttttggaatactttgaaagcctctgataaaagccatgcagaaaaagacttaataattatgattagacacccaaacagcctagagactcttgtccccctgttcctgactcagtaatatattggttgtcttagtccaggcaaggttgacacgcattcttcttgatgtgtctggaaagtcagctgtcagagcagcttaaattctttttcactccttggaggacattaggcaacttagagaaatggccaagtaaataagacttcttctcatcaggtgtgtcatgcgacaactggaagcatgccgcgagggatggcaaagcagtcttgaaaatctccaagcactttagatccaagtgaagaaggggaaacaagcaaaacaaatacaaaacaagggccactttgtcacttctacccaactgtggctaaggaaaggtgtgtgtgtgtgtgtgtgtgtgtgtgtgtgtgtgtgtgtgtacaggtgtggatgtgaatgggtgtgtacaggtatatgtgtgtgtattgtgtaagggtgtgtgtatgtaagtgtgactgtgtgtgtgtgtatggtatgtgtgtgtatatgtgcttgtgtatgtgagagtgtgtgtgtgtactggtgcatgcctgtttctaacaatagtaaaagacaaacaaccacaaaaccagagctcagaccagacttcaggtctagtcttatatgtctgtcccagattctcttttaacttgagaaagttggctaaagtgtaggacattttcttttctgtagagcggggtagtaattgaaattcattagatgatagggtgcctctctgttattgtcttctcctgcttcattcatttgcagtcactcatgaactattgttttgtagatatatagtgcagatggacccctcatttacctcagtgaccatggtcctttgcagaaaacactgtttttgcctctgtctgttctctgttgttggctcctgcccctcagtatgggcgtgcctttagaggactaagcttggttgtcccattacaagctgtgggggtttgcaatgtggacagtgattatgaaacatcagggtctctaatagtctgagggcaagttcactgcagactctgcatttcggacctctgagtatgagtttggaaatccaagaaactgggttgtgttgtttattcctgataggccagctttttccagatgtgcgctgagtgacttcagtgtaagctcctggaagcgtctgtatttgtgtatttctctgtggattaacactgcaagtgaatcacagagaagggaagttggtttatacacctctcaccttttaactcgtgctggaggtttcacagggagcctgcgggatctgcagagtcaaggctgcctatgaatcatcctgccatttcctagtggagtctgttaaaagcctgtcacccgagctccagtaataaatgtgttctcattctctcccaaccacccccccacacctctccctccctccctgccccctccttccctccctccnnnnnnnnnnnnnnnnnnnnnnnnnnnnnnnnnnnnnnnnnnnnnnnnnnnnnnnnnnnnnnnnnnnnnnnnnnnnnnnnnnnnnnnnnnnnnnnnnnnnnnnnnnnnnnnnnnnnnnnnnnnnnnnnnnnnnntccctccctccctccctccctgtctttagttcaattatggagaatccaatttaccctcattctctaaggcatttacttgaagaaagagagtccttgggcatcattgtatgtaattagatttttgcacctctgtattgtgaattgggatttccaattttccaccctaaggtgggaagtggtggtgcttagcaacccaagatcatagctgatgctataattcacgaggacttataaatctctacaacctcagacgcccaggagaaatacacatcggcatatattacaccttaaaattattgaaaattttggaggcatttttcttgtttaccaatattaatcttcacctgcaacctcagccggttttaagaaactgtaccaaaagccagctcagtttcttttcgtgtggaattcatctcagtgccagcgaaatagccatgttttttttttttgataattacctttcataatggaaattcaatgtcttaaaaacaatttttgtttgtttgttttgcataggaaaagccacagatcaagggctaattaaataacactggataaaagctataatataattttcaaagtttaggaaagagcacaatgtttgaattgttttgtatctcgtgacacaaagcagtgttttaacgtctcctattgttttcttatgaactagtctcctaaaaggtgttgaaatcgaggaaccttccccttttgaaagattttagactttagagccgtggttctcagccttcccagcgctgtgaccctttaatacagttaattctgctgtggtgacccccagccataaagtaattttcattgctacttcttaactgtaattttgctactttcatgaacagaaatgtgaatatctgatatttctgatggtcttagatgacccctgtgaaagagccattcagcctcccaaaggggttgagacccacagattgggaacagctgtgctagagcatttatagtcgctgaagtaaccctgggaatcatagggagtgaagcagtatgatagaggagaaaccaaataactgataaatagatttgagtgaaccactgcagctgtggatagtgtcattcaaagaaccttctagaatgaaaaaaaaacctacaaattcagattctccagactttatatacgtttcagccagactgtcacttttctcacctttataaactgatcaaatctaacaaaccaggatgtgatgttagtaatttcagacattttcacgggacaaacttatttaaaagcttaagaggaattagcctgtaagattctgatttctgtaaacaaatacgcattgggcttcatggtgcatacctgcataagaagtagtgaggccccaaaccttccttcctggggtgacgccatgggtttcattattattatgcattgtgatgttcttgggtcttgaatatttactcagctgttttcccaatcacttgccaaatatttgctgagtatgcaaatacagtataccctcggaggagagataagccgtatttaaacagttgtagcaaaagtggagcacagtttgggagaatgtgaatggtggtgagattgtttccagccggcccgatctgagaaacgattcttttgggcgggctttggcctttggccttgaagagtgtgaaaatggccaacagaatacttacaggagacaggaatagattaggtctggatatgcgccagctatattgagcggtgtgatatatgacgggtagggtagggttccttcagtggcaggctgaagagttacaggcagggagatctactgaggaagaaaaagtggcatagtctgatggctccacgtccctggaacttggcaagccaggacccagagacatgtgacttctgtcactaatgaggtctgccccttacagcattcagaagagtgtccctatagtctcagtgccagggctctgctctgcagggcagacactcattttagcatctggtcgtttgcaacttgtgacagcttcatcttggataggtcccagtggacatacttttttttttttttttttttttttttttgcctctcctaagctgtccccttatcctagactctgcccggcccttcttagaatccattgctactccatgaaagaaatgttggctttgtttctacagtctttagggatctgtgtctcagtcctagcatttccctcttctgccctgtacatttttgttcatgttttagagcagagactaagtgattttgccttgctgtgctgcctacacagagaaaacttagagattcttacaatgttgagagttaatcaagtctcagtagaggattcagtggttgaggtgggtaaagggggatggatttaagaaatggtgtaaagggactggagggatggcacagcagttaagaacactccctgctgtttggcagaaggacccgagttcagtttccagcacccataccatttaactgtctgaacagtcgctctagggcatccgatgccctctactggtctcagtgggtacctgcacacatgtggcatatactcacacaaacataaataaaaaaataaaaataaaacttgaaatagtgtagagataaaagtaacagtttagtttagatttgcttgaatctaggagagagggggttttagaagggcctgcaactaccttttctgtagaaagctaagcttagtgtctcgagctgtggaagaggccttttgattttcatgaggattgccaagggagtaaattgttgcattatagtgcccagtacaggctggagccaccaagtacgagtcacagaattgtacctgtggtgtcagtgctatgttcctaatggagaagaagcccttcccccgatgccagccgttctgtgagccattggcctccttgtgctgaagttctggcaatgtggctttcagaacacaccaatataggggctcctcatcatctgtatcttacaggtatgaggactgagttcagtggagcacagaggctaactgtgcctttgccttcacttggtcaatgataaggttttatgtagttgagggttttcagtttagtttggctttttgagacaggggttcactatttagcccatactggcattgaattgccaagcactggaattacaggctcgagccactctgtctggcattatgtagttgatttttaactcagggatacacagaggacaacctaagctaaacacatctatggaaatgcaggtgatatttgtttcaggccctccgtgcatgggacagttagttgctttctcttctgcaaatcaagatgtgtccaactcaagagtacagtaaacgggctgctttcttattttttattttcttagttcattagttcaaactgaggggtgtcttctggtacttggctagggggcttccagtatccccaaccttctagccactttgttactctgtgccagccatggcaccaagaacttttaatgaggtatttcgtgtgattgttataataattctgtgaagctactccacatagccagcaaatggcagaaatacttctgccatctttgcctgagtccagagtccaccttcctaccacagtggtattgttgacccaaccccaggttttgcctttatcctcaaagtcttcaaagtgggtgttcccttatgtaggtccagacaggttcaatctaatgtctagatgcattttagatcgactttgttttttttccttcatcttttgatgctattagctgttttactttacatttgaaccagtcattaagtaaatacaagaaatctgcaattttctttgtaagagtgacttggtgctgtgttgagggtgtcacacgcagatattcagatcccagaaacacttttcacatacagtgggaggctagtgtaaaggcaccttggtagaagcagggcataccagtaggagacttgggcaggtagtagaaaattggctttaatagccccacagaattcatcataataggatggccaccttctttcctttcattgtagtgcttgtaagagagcaaacattagcatccacaattagcatggtactcctcacacagaccaaacagtgcttacctggaactaaagggcaaattttgctcatcatttatactctcattgtgggaattctcaaagatttcccactcctgtgtaagaaaattatagacaaggatataggattactatttatgcgttgtaataaaagctaataaaataataaccaattagatgcttataaagcctgagtatattaaagtattatgcaaatcctgattaattgtaataccataaactcagggagcaagcaaaagcatgcttgactcaaattataggggcttttatttgcatttctacagaatctattattagtgggtctcaaaggaccttacaagtaataattactaaagcccataaatataacccataaatgtcattttattaagggaatacaaaagagctccccttcctcatacacattataagactgaaaaatgcccaagcagaagtaggcgtgtctgccttgtagagggtctcagtatgcatgggtgtttggctgtgacttcataggcacacacagtcggctgtgggagtcgaggtcctcctactgagcgtctccaaatacctggctcagatccttcatttccttctggatttttacacgcatactagctccgtgtaactctttccaataaggtatattttaacattcctgtgtcaactaaaacacctgatttgaaaaacaaaagttaagctaagcctcccatgaaatatttagaaatatttttaaaatgctatccctgctttatttgcctcaagttcctatcctacctattgcaagctggaagtgtttgtcagaaaggatggcgaagctgacatttatctctatcctcggaaacaagtatcgaagtgccaagagcctttccagtctggctcggaactctcccatcgcccgtactaagcagggcttggaaaggcaactgaatctttccccttcctctgacaccaggttctacgtgactgagagcaaaatttatccctggtgtcaagacaccaaaacgtcactgctggtcagtgtagggatgtagttgtgcctttatgatcatgcttccatgtcacctaggctcagagaatatagacccacgtctacctaccctacttcacagcaggggacagcaggccttggagcagaggccaagtttatatgggtggtttctgcctcacagttagggtggggtccaccgtccaggtctctagactttcaagtcagtccctctatcttacgtcgaccatatgacactttatatcacaaaaatctcctaaactaggagcataggagcacaagtctctccctctcccttgccccccaactgtgtgtacatgtatgtgtgtacatgtaggtgtgtgttcacatacagtatgtgtttatgtatgtggaggccaagtgagtttctcagtcactctccactgtttttgagacaggatctctcactgaacctgaatctcactactttagctgaactcctaggctgcaagttccagaatcctcctgtcttcatccccccggggccaggatttttacatggatgctggggcgggggggtctcaagtcaggtctttgtacttgcctaaccaatactttaccaactgagccatcttcccatcgtagtattgtattttaatctagggctgtggaagcaaaaagactagaggctcagcttccaggttctgagggaaattgagagatgtgtacacagagagtggaagggtggactctgagattattgtcgtgtaggagataagtcacaagctagagcatataggaggtaaggcagaatactcttatgggcacagtagtgagtaaattgtacgtggagaaagactcctcctcctcctgactggtccttggggactgttgagctctttagcgtgatgttaggtgaaggagggttcgaagcaggagtagcaggagcagcgctcccagctaacacaggctgcttatcaacccctggtcagccgtggtttttgggagatgggaggaatagtcaaagtaacctgatagctattctgggaggcatgctacattgcagaattctgattttcatatttttccagggaaaactgaggcttctatcaaaaacttcagcccctactacagccggcagtattctgtagctttctgcaatcatgtgcgcagcgaggtggagcagcaaagagatttaacgtcacaatttctgaagaccaaggtgactcttgagcactcgacttacatcgttctcttgccagagaaagggttatagatgctaatatttggattatttgaatgacagttcttcaaactacactaaaatcatgtcacactttaaacaacacctgaagtgagaccatatatgatttctggttgattgtatgatctataaaaacagaaagctatacaaacatcctcattggtggtttggtacaggaaatttaacttgctgttatgaatttcaatctaaaaaaaaatcatgattacgtttgttttggtcaatgatcaaacacgatttcctgagttgcctttgatctagtatgtgaatttcaaaactccctaccttcctggagtttatgttcaaatggaggagacagatggtaaacagtggaagaaactcacaacaggccatggtaagacagcgatcaaagcttcagacacaaatgaatcaagactcttgtctgggggaagttgatagggaaggaagccctctgtagagactggcatcgcatatgatgataggacagatcaggtggggagagatatctggggaacaagagtcccaagaggatggagccagaaatggaaagatcctccagcccagagtcctcaaggctctacgagcctgcccagagctctgagtgaggaagaagagtgggcagtgaccttggggagacgggtagggaccagaactgtaggaccaatgtaagggcttggttttaagagtgatgggaagttccacatcagggtaccacttataggcggacaaagacagacagaattttaagtgtgtagtttgttgttattctttttatttttttagtgggctctctgtaaagactagaccctgaggggagaagggaagtgatagccattgtgtgtgtgtgtgtgtgtgtgtgtgtgtgtgtgagtatgggggccagaggtcaacgttgggcgtcattcctcagaaggaggaaaccttggttttggagacagggtctgacactggcctgggtttgcgcactagcataggcaggctggctagtgagctgcagggatctgtctgccctgtctacctgcctgcctaccgctgggattatacagcactggattttcaagtgtggcttctgcttgtgtaataagcactccactgactgagctatctcccagcctggaaaggaagcaattttgacagagctggtgggatctgttgtgagataacagggaggagaaatgtagcaatggcaaaggcgacaacgtggcttttcacgtgagtggaagcaaggggcatggcttttcatatgagcgaagcaagggaatggagctgccttttactccgagaggggcaggggtgagtagggttagggggtgtgggagtcagttcatttttgccaaaataagtttgagatttttttttttttgctttttaaaagatctattttatcctctcccctcgttttgtgtgtgtgtgtgtgtgtgtgtgtgtgtgtgtgtgtgtgtgcactcttgtccacaggtgccagggtgtccagagatggtgttagattccctagagctgtcgtttcaggtggttttgagccatcagatgtgctgctgggaactgaatttggatcctaggcaagagtagcaagcactcttaatcactgagccagctctctggtcctgagatgatggtgttggcagtggtggtggtggtggtgatggtgatggtgacgatagtggtgatgatgataatgagggtggtggtagtgatgatgatggtggtgatgatggtgatggtgatttttacattcacctgtggacaggttggtcaggtggatggttgttctcatctggagcccagtagacagatggggtctgggattgttagctcatcatggagagcagcagtgaggtatggtgggaggaggactgagacagagtgaaaaggcaccagcctcagcagcatttgcagatcatgatgaggagagagtgcaggcaaaaacactaagaagaaactcccggaggagtaggagaaatgagtcagaaaagccaggaatgagtgatgagtggaccagctgctgctgagagtctgaatgagttagccagagaattcagcagcatgggaattccacaaaatagtctcagggttcagagagcacgttgggatgcacgttctggagctagagagatggccgagaaattaaaagcacccgttgcttttacagaggacttgaacttgggtcctaggaccacatggtgcctcacaagcacctaaaactccagatctcaagttctcaatggtctgatgtcctcttctgttctttagagacactacacacacttatggtgcatatacatacacactgggaaaacatacacataaaataaatagatttaaagaaaggaaagaaaagaatgcaagtcccaaccatttacggtgaggtgtagctgttgccttggccctggggacacagtggagggaaggtcactgggacccagaaactggagacctgcctgggcaacagactcctgctttaagcaaaaccaatgcagattctgtttttggaactcagagactcagacaggataagtctatcaggagaccacagttttgattaagtggcctgagtttgagaaacgctgtacataagaaatataaagttgtcttcagcctcatttaaagagaccagggaggtcctgtttatctgttaatgaggcaagatagagggtagactcattatctgtcaggagagctttttttaaaatatctatttattatttattttatatgtaagtacactgtagctgtcttcagacacaccaggagagggcatcagatgtcttttaggatggttgtaagccaccatgtggttgctgggatttgaactcaggacctttggaagaacagtccgtgctcttaaccgctgagtcacctctccagccccgtcaggagggtttttaagtcctggaatttggaatgaaattcatttcatcccttagatgagtcttaaaagaaataggcctgtctcttccgtatgattcatataattttttttttttttttgctttaaagtaaggtgatatgttttgaaggcaacgcatgcctgtttaaaaggaagaagtcagtgtagcatcggtgacatgtcagacaagggcacactcctatattttacaataataaggaaactgtgcagcagagcaggatgcgtgttctcctatacagaaaactcaatagagacctaatgaggagccgaatagaatcctctagcacatatatcaaggttaataagagataatcatgaatataagagatagaactgggtgttgctggagtgctgccttcttcaacccaacacataccttttaaaaatcaggaagatgaagcctggaagtggtgacacacacctcagtgctcaggaggcagaggcaggtggatctctgtgagtttaaggccagtttggtctatagagcgagttccaggacagccagggctgcacaaagaaaccttgtctcaaacaaacaaacaaacaaagcctccaaaccaaccaaccaaaacaaaagaaaaaagcaggcagacaggcagagtgtttacagcctaggtccccactacttttggaaaaggtgggttaagtaggaggttgctttgaactgtcaattgttattattatttgtttgagtcagggtctctctatgtacccctggctagcctggagctcacagaggcccacttgccttccaagtgcccagtggaaggtatgtgccattatatctggtccaactgtcaatttgatatctaaaatcacctggatagagcatcttaatgaggaattaacttgtcctgtggacatgtgtctttggtattttcctgttgttgcaataagacaccatcaccaaaacaatttatagaaaaaaagagtttatttggggctcacagttccagaggggtagagtccatgactgttacagcaggaagcatggcagcagacgtgcaggcaggcaggcatagaacagtagctgagagctcatcttgaaacacaaccacaggcagagaaagagagatttggatggcacaagccttttgaaacctcaatgcttaccgcttccaacacacctccaagccatgcacttccttcaacaacaccacacctcctgatccttcccaaacagttccatcaaactggaacaaagtattcaaatatatgagcctatggggtcattctcattcaaaccaccgcattaagtctgtggagcttgtcttagttgttgattgatgtgggaagacccagcccttcactctgggtaccactgagctatggaagagagatgaaagcaagcaagcaagcaagcatccatgtgcttgtaactttctttgctcttgactagatttaaagtggctagctgcttcagttccctgaaacggtggcctggagttgtaagctaaacaacctctttattctcaattgcttttggaagtcaaactatttttatcacaacaacagaaatcaaactgggacaataggaaagcagctggctgattctagacaataaccttgaggcatgtcagtgagttgcaggggacacccatagtgtgaacgcagtacattgtcttggtcattcacacagcttatcaagtatttattaagtgctatctatatgcatgcaaaggatataccttccaccgtatgctcccattcctaatctatacagagggaaatgaaaatcagaacagtaccatgtaacaagtgtctgcattttctctgaaggaatctgaaggagaatccatggtagccaggagagaacaacagtttccccaggattactgcataccataatctcctaaattattccatgataatatatgattggaaagatatattctcttttgttgtgacaattaatagtgtctatcttctttaagcccccactggaaccaggaacggttttgtatgaagctgagctctcccagtttgctgaagacatcaggaaatggaaagacagatacattgtgattaaaaacgattttgctgtggaaagctatgagagcaaagaggtaagagatgcccacgttaccaccagttcttggagtattttctttaaaacattggctatgttacttggcatgctctagccttggtggttgattgatcgggtactcacctcaattaataggtatttgttgagtatctactgtctgccaaatgccttacatagatctgaacgaatagtagttgatcagacacatgcttgcagcataaggaaaaagttaggcttggaaaaagtgatggcaggggagtgtgggaataacttgtgttaagtgaccggtgcttgatgtaagagcttgttcagtgattattcattcattcaacctcaaggttcttctcagccctcagcttgccactgctttctgctctgtctcatctttccactcttaagcatcacatctgatacccgactggggagttattattcagtaagatagtgactgcatttgtaggggttccaacaaagttagagggccctgaaaacttcagtccacttagacttgggggttgtttttatttagttagactttttccagattatttgtcttggctttaccaagtgaaaacaacaacaacgtcatcatcatcatgattaggtgtgtaaaacatctatacctggaggtcttaaggttttaacgtttctgctttcttccctcctatagagattgtgtttagctagatcagaaaggacacagagcagtgaatttggaaatctaaagtttagtcaagtatgtcactgactagaagtaaactctggacttagccatcagctgaacttaccacgagatcaaatgatccagcgggtccctgagagctcgtgctatatgcgtttctcatccacgcatattctcaagtacctgtgcagtgctctaatataattaggattccactccatccttaatccacactcccaacacactacgagcaacagcaacaaattatcgtaggcttttcatagacatcctactgtgtcccttagaaggctaggagaggtggagcatctcactaacattatgggctttgagtcttttgacagttactacgttacacatggccactagtctctgttttctcttctgcagactggcaagtgtcgctccttagaaagacgtaaaagaatgcactgaagcaccgagcatctggctagcccatggggtagtccagaataggcaattgttcctatgcttgctactaattgaaaaagcttgttatcagatttattgaggtttttgttgtttgttttttttttttttttggtttttgttttgttttttgtcacatttgacagtacatgaaatttctttatgaattaagttttggcgactttccttttttctttccactttaaaagatattcttccccaatttgaagtttactctttcttttcgtggctcactattttcaactaatttaagttataaaggtgtgatcaataaatttgatcatgactagatatttctttttttttttttttagattttatttatttatttattatatataagtacactgtcgctgacttcagacactccagaagagggagtcagatttcgttatggatggttgtgagccaccatgtggttgctgggatttgaactccggacctttggaagagctgtcgggtgctcttacccactgagccatctcaccagcccaatagttagatatttctaaaaaccacctaggtatttaaatgaaaagtccacgtagcttgtcatcatcatttgacactataccaataaacatcctgtttgttaatttatagacataattttaaaagtcacacataagagttagacattaactatttataaatgtcttgttattttgagagtccaatttggtgttgagcacagggacatcaaaggattctcatttcataatccatcccaatttccctcacatttgctggggacttgacagatgcaaggatatgtctggaatctgtcactcatggctgggttcctgtgcattattcaacctctgtgaatttgagttttcacacttgtaaaatggagataatatcacagtgctatcttgagaatcaaatgataacgtgtatagacacttattataaccccaaacaaaattcacagtggagtcctgtctgaatcaaatcacttcacaccatccccaagccattcaaagatatattttcctgttatgctctgggtccccagtgcatttaagcagctgttcagtagttcttccaagtagtaaaacaagtttcacagcgctcggtctttattttgttttgttctctccaggcacctcttagagatggggcatgtgttgttgttattttgggcaacgatcaatgttattttcgttattctcaagggcacactttcgattgtggggtttcaattctcaacttgccctcaagttacttctttcaataatttgccttgaccatcaggctgcccgtcagaggcacacacttgcatttcatctcattcatttgtccacgggacatgtcggtataggcacttaacagggcaatggatttcattcgggtttctcagatagcagaatgtcttatctgccagccagaatgttttctgatgtcataaaactgcacttcacttccaatgacttcactgcaaaacatccagtcacgtctaagggcaaacggtcacatagtttattatggcaacagttttgtgtttttgctgaaactccatggtaatcatagtagtttcatattctgcagtatccctcagcatcaaatgcctacatcagttgaatactttgttacttgtggagcatgtgtgtgtgagagaggggcaggggggggggcggagagtgaggagagggannnnnnnnnnnnnnnnnnnnnnnnnnnnnnnnnnnnnnnnnnnnnnnnnnnnnnnnnnnnnnnnnnnnnnnnnnnnnnnnnnnnnnnnnnnnnnnnnnnnnnnnnnnnnnnnnnnnnnnnnnnnnnnnngagagaaaggagaggaggaaggagagggaggagggagagaggaggagggagagggagagagagattgcctaccttgtggttatcagaatgagtcagagacatcagtgtttgaagtggtgaacattatatagacatatagacattacagatactcctcttttccatttaagaacacacctcctgtgaatttccctgagattagggaccctggtttttcaggagtgaccatcaaacagatgtgggtttgtttttttttttttttttttttttttttgttcatttgtttttaaataccaccttataagcagcaagaatgcaaaaacaaacaaacaaacaaacctaactactagctaactaactattactaacatagtatggtgatgtctattgatgggtatatatgtctgcatttgtttgttttttaagatttctgacattttcaaaaatatgcattcagggaaatctcttatttaatgccatttcttcctaggcctatcagagaggagctgttcctaaaagcaggattcttccagccggtggcaaggtgttaacctcagaagaggaatatagtctcttatctgataagcatttcccagaccccactggtgagtccctttgtcttttcctgaacttactttgtctaggttgaccagcagtcctcaatgagggagaattgtatagatagaccagtagtcttcaatgagaaggactgtgtaggtaggccagcagtcttcagtgagagagaactgtgtaggtagaccagcagtcctcaatgagagagaatggttcttttccagagacaattggcattgtctagagacttggaagatgtgcgttatagatgatgctgttaaactgtccacaatacacagggtgaccctgacagtgacagatgtgtggcctaaggtaccagtaatgccaagatgagaaaccctaagatgaatccttacactccatattcatctagaaaatggaattactttactgtaggtccacattataccctttctatcacttcacctccactcggtcacacaggcagttgctgtgttcctggcacatggaaagtgttttcttggtcatgtatcttcggggatattctgtagaatttgataacaacactcaagacagcagaaataaacaggtcaagcatcctgtgtgacaggcacaatttcatttttccgtaagcaagtcttgatctgttagggattattatctaatttttctgtgatatgcaataaaatagtttacattctttaaataatggttccagggactcagagctaatgtgtaaaagaaagcattgccttagttcacccgtctataagaaataccgagtgcctgctgtagaaagaacattggcctgagaactgggggctgggttttgatgcagttcttattgtgccactcggtgaacgttttcaggggaaccggctctcagtgcctctggcttctgtttctcctgctttaaaacgaagctgcgagcttgaaaattttgaaagaatctttccaaagctttaatattctttgattctcattcattttacttatttttatgtagaggagatgatggatactgcataggctaaatagggcatttcatagaaattcatgaactgtgcataatgtaataactccatctgcctttgtgtaaatcacactgcgcattcattacttgctttcttgaagagagccctggatcttattaatgggcatgaacatttcattagaatttatggagaactatataatcatttcatcagttgttattctggtgtagattgcttagtatggtgtttttaataatacaattataggtagtgcatggaccataaacctagattatcaaattattactaaataattcaagctaacacaatgttttatgtgccccctacctagtactatacatgatattttcttccaacgtctgcctatctgccatgctggctgtatctacgtgccactgaaagtgggaatcccagcatgttgttgactcttgagaatctctccagaactttccagtgtaatctgccagaacagacgatgcacttatgggtttattgatgaaatcatatcagaaggaatgaaaaacacaaggctgtgtgactcatgcctagatagatagcccagggctccacacagtgtctccatgactatttttattgtatggtgtggcctactgagttttaaatatagagtactccacagtagatcatttgtgatattcttgtaactcaactcagaagaaaaatgtaggcggatggaatctagagaattgttatggaaggtttagcgagaggcaactagaggttgagaggagggagttttgtgactggtcaatatgggaggaattgactttccttgaggaaggctctggaggctaatggatgaatagatgttctttgtagaatgttcagtcgggaagatctgtcacaagtgttgtgctgtgctttaccatatagtgagtcacttatttgacattttattagttagaatctggtttgctgcacacaatgaaattcaagttaaatatgcaaggttttattagtttcatacaagcatttgagagttgctccaggatcagtgtggcagatccacatacctgtcaaggacctgggctcttctggctttctcctctatttctcctagatttgggcacttattagcacttactgttctaacaacaacatggatactggggctacgcctcttttcagattgcatgaaggggagggagaggaggatgctgttcctttccttaaggatgcctgcaggaggtttgacatgtctattcaggtgatttcctgctggccagcacttaggagcagtgagctaccatgctacaagggaagtgtatgtgacattgtcatcatccagaacgtcttgctcagttagaagacaaatggcttcaaggaaggagtctcttcaatgtgtaactgtttgtttctttactgtgttctggttgtctgccaagcactggtgggttcagcttgtgttcccaaataattctgtctgttgtcttcagaattttaggacaatggaaccaggttcccgtacgtgtcttaaagaaatcttaccttgtattattaattttccggtagctgacttagtcctgaaagcaccctttatggttcatatctatttcttggcatatccagcatgctctagcctcttagatgatcttgctttcctttctttcctgtgagacctgagctcacagaacacactgtgttttctgtgtgctccctaagaccctagaaagaagttggatcttttcaccaagtgcaatgtcatgcgatagggatgcaaagctaaggctggggaaggctcctcttctcttctcatctcttctcttctcttctcttctcttctcttctcttctcttctcttctcttctcttctcttctcttctctcctctcctctcctctcctctcctctcctctcctctcctctcctctcctctcctctcctctcctctcttctcttttctttctttgagacaggctttctctctgtaacagagccctggctgtcctggacttgctttgtaaaccaggctggcttgcctgcttctcctttcaagtattgggattaaaggtgtgagccaccatgccaggcctgaggtagggtttttgaagagagacttggtttcacatgcgtttctcagaaatgattttgaagaaatagttaaacattcccgtgtgtgctgtgtatgtgtagaattgagccctgatattgggcaactactgtactattgaactagacccatagcccccaagtcctctcagggccactaaaattttctagaccaacagaacatatctgctcactcagcgtgatgaagtgtatgccttctaggttgtacaagaagatgccagaagtggactccaccctctagggggcactgttcagggaagggtactctgagaatcaagtatcagggttcatttacccacccttcctccctagggagtgccaggcatggaaactggccactctcacattttaagagaacattagagagcacatagtccgtcttggtggcaggtgccagtgagaacttcccggaggagggccttgtgaagggcgaaatgatttttctctaaaagagtatgatagaaaacaaaaaggtgataaggattgtgggaataacttaaagtgtggggaaccaaacatacagcgagacacgtgccaacccttacagggagccacagagaggcaaaggaggcaaacaacaacatgcaaacgacagggttttgttgttgtttattttttattttttaaggagaagatgacatgatgagaagcaggagagaagcactcctggaagtcagtgggaggggatgctatacaaagaatagcaatgaatagaattccaagagcaaccagtgttacagatcatgttaaaggacaattaccagtagataagctgtacactgatgcccaagatggcattagtgactttcgtcactgggtttcaggagctgtggggcaggaatcagactgcagcgagaaaagcaatagactgtgaagtcagcaaatattgctcagctttgccattgaggaagagactttggggagtcggagcctgcaggaggcacatgacagggagctctgtgagggtctttggagattcttccaacagtagggagctgaggaagatgttttggctgtctgtgtctctctggacgagtagactataccagtgggaaggaaatgctgggctggcagtaggattgagaggagatgaaccccatttccctgccatcttgttatcctgtggctgtccccagatacttttgcagaagtgtttgaaacacaagactcatgctttgaaactacccgtgttcctattatttctccagcttccagcgagaagaactctcagccctttgtgctcctccctaaggcattcccagtgtacctgtggcagccttacctcaggcatggctacttctgtttccatgaggccgccgaacagcagaagttcagcgctcttctcaatgactgcatcagacacctgaaccacggtaggctcagctgctctctgccctaacggccaccttttctgaactgctttggtcagtcatctgtggccgtaattcttaaagcctaagaggacattgccataaggaaagaaagcggggctataaatagcaagctttgggcacaaggagctcagtggacagagcttaggacagttctgtggtagcagttgaaggcctgttctagagggccccctggttattcattatcctggccgctccatcattagtataatccttcctacctctttctcctggtgtttttattttgtttgtttattagggggattgcttgattttgactacaggatcgtgctaggaaatactagctggtcttattctcactatacagcggctggtcttgaactcatagtaaacctcctgcctcagcctcttgagcactgagatattgagcatgtagcaccatacccacctttcctggtccttttaattatttaccagcaagaatgtgccagtggaccctttatgtcacttttcattgtgtatttctgtgtagcggatacccactaaagatcagtggcatggttcatctgatggtaatctaatacttgttattcaatcagcaatcctgttggttagcttcctatcactgtagcaaatgacctttgtgctaacattatttatttgggtgattgttgtctgtggttggttggctctgttgctctgggcctgtgatgaggctgcggatcttagcaagagggaaatgacagaagagggagtgagggtcccataatctgcttcaagacagatgctcaatcaacgtaaagacctctgaccatgctgcatatgtcgaagatctatgacaagcacaaagctgggaactaagcctagaactcggagcccttaggaggacttactcagaccacagaggcagttcttaaaacctgaagggatgtaagaatcccgggggaaacctgatcaaaagctgggaagatagctcagtgatgatgagtgcttaccactctccgaaaggactagagttgagtgagcacccaggttggggaagctcacaactgcctgttactcagctacaggaaggtcagagaccctcctctgggacctctgtggacacctgcatttatatgcacagacccccacacagacacgtgcacataatgtaaaagaaaacttaactaaagcacaggagcctgggcactgtcctcagacagtctaattcactgtgattggcaggaggtgggatttgctttcctaacaaacttccaagtgatgtcaccgggcaccctcgaagtagcacagctttagatagcattattttgcttttaggtatggatttacttatctgtctgtaaataacatttttttaaagttttttcattccaatgtcttgctttttgacatttttacatgaatgtaggtttgtctgggcttgcacataactgaactgtatccctgggagcgacaggcagtcacatgccacagaggggcttagtctatgccaaccctggatgggtgtacaaagcatgcaaagttcctcccttgggggagtctaagtgcaaacggaatggaagatcaagctcacccacacattctaacttgatagctagcaaagttagcgtgttaaagagtaactagaaatctcgccaagtgaagaagcgcgtacagatgaccccagctctgaaatagctcaacttcaggacttcccagatcatgatggtgcaagagtggtacctgtggggctggctgtgtgcactgggatgctctgtgtcagggctggctgtgtgcactgtgataccatgtgtcagggctggctgtgtgcactgtgataccatgtgtcaggtctggctgtgtgcactggaatgctctgtgtcagggctggctgtgtgcactgggatgctctgtgtcagggctggctgtgtgcactgggatgctctgtgttggggctggctgtgtggactgggatgctctatgtcagggctggctgtgtgcactgggatgctctgtgttggggctggctgtgtggactgggatgctctgtgtcagggctagctgtgtgcactgggatgctctgtgtcagggctggctgtgtgcactgggatgctctgtgtcagggctggctgtgtgcactgtgataccatgtgtcagggctggctgtgtgcactgggatgctctgtgtcagggctggctgtgtgcactgggatgctctgtgtcagggctggctgtgtgcactgggatgctctgtgtcggggctggctgtgtgcactgggatgctctgtgtcttgatgctgacaagagctctctcggctgtgttaccagagcattttggatatattgttttgtggttttgcggccaactggttcacaaaacatccacctgtcactgtgcaggaggaatttaataatttattgtaacatgggactttgcagtagatgattatactcaactgcagggttaggtaagtatttgaacacgtttaaggcagacgaggctaagctgtggaataggtgaggtatatcatatgcatttcttatcttttctttcttgctttttctttttcctttctcttctcttctcttctcttctcttctcttctcttctcttctcttctcttctcttctcttctcttctcttctcttctcttcctttctttctttctttcttcctttctttctttcttttttggtgttttgagacagtgtagatcttgctgtctggaatttactctgtagaccaagctggccttgaactcacagagatccacctacctttgcctccctagggctaagattaaaggtgtgtgccacctgtattaaatgcatttctaatttacaatggaagtgttgcgatggtacctgactataagacaaagaacatctgtgtgtgtgtgtggtgccgaggacatactaagtaagcgctttgtcaagtactgagcaataccaccaagcttgtacagaattttaagttttgcagtggaggcctctgaacacatgagttttgagctgagtcacactaaaaagtatcccaccacacacacacacacacacacacacacacacacacacacatacactgcaggtaattttattatacacttagtttcatgtttggagatgtccctgagactatcagtgctactgagtgacagtcattggtgctgcagctcagcacttcttggttgatatgtgtgcatgtatatatgtatgtatgtttgcatgtatatgtgtatgtatgcatgtttgcatgtatatgtatgtatgtttgcatgtatatgtgtatgcatgtgtatgtatgtgtgtatgtgtatatctggatgcatgtatatatattcactatgtatatatgtatgtatgcatgtatatctgtgtacatgtatgtgcacgtgtcatggcatgcatgtggagatcagatggtaatttggggagtctgttctttcctgttaccattcaggttttagggatcaaactcattttgccaggcttggtagcaagtgcccttactggctgagacccctggccagatccgaattcttggttttaatgtgtgtgtcaatagaggctaataataataataataataataataataataataataataataatagatgtaaccccattttgttacagcaactccaagaaatataatattgactcttaactagagccttatgaaaatgattcccttattagtctcatgcttgtgtcgttaatgttttagagtcagagatttgctgggcactagctcagttttcaatatacttaaaacttctgcatcttgggttttggtctagtaaggacagacagctggcacagaacccaggaaatacaaagttgcactgaacagagaatgtgttctgcccagtcaaaagggacttgctacattccccattccttgtacataataggagtttctctggggagctttggatggtgtggagtctgcatttagacaccatttatggaaggtctgagtcaatttagaacccagctctgctctctaggatgttgtcaaggcatagagacaatgaagtctagttatatctctctggtctgtggcatattcttcaaaccaaagaccgtttgttccctcactgagtctctatgctgacaactgggcacaggccatcatagcattacagagagcagtccttagttgttgcaggccaatgagctcatggggctttcccatcttgccccatcccctgatttttttccccttgtattttatggcacaatgtaacactgtttttactgaattactttttctgtcccaagtccctacctattattcattgtgtcatcttgaataagccattaagaggttttctcaagctgccagttcactgtatttgccagagttgctcccaagggctagaaaacactgcctgggaccagggcctgagcctctgagcaggactgtttgctgttgtcattgctccattgactctaaggccaccacaaagctctgctgagaactgggtcctagatattcgagtgaagtcagccactgttgatcccacacgggcttaaggcatgttccctagtactcaggtcgataacagctcagcacacttgtcccaaaaatgttggcttcaaatcgtcctagatatttatatctgtgcattccaaatccagatgcacttgtgttgaatgtaagaggtgtgtatatttaactttgacaaaggtcctgtttacatgttcttcttgtatagcacggctatctgaagacagatgaggacaattggaggatctgtggtccttcgctcttcaagggagggaatgacggccagcattggtttcactaaggaactccaagtgtgctgggtagatacaacatctcccaagattaaatcttaacaggacatcacatgccaactcagttatggcctggcatttgtgtgtgtgtagtagctgcttcaggatccacactgtagtccctggcctcggcgggtgccacaaagtgggatttatgtttccaagatgtgtgggggcagctttcttccccaaggctctgtcctgtgcttccttcacacaaacagagctgaacacaggctgtgcggatggagaagcgcgcctgcttctccagctgcagagattcgggagacagggatcatgttcctggcaggagggataggataattgggagctgagaagcaacacagattatggaccactagaggaactgaaggaattctgtgagctggagggcatggatgagcaagaggagacaagggaagacggcgagatggactagatccaactggaaaggggctttatattatatattaagaatgtgggggccgggcatggtggtgcacgcctttgatcccagcactcgggaggtagaggcaggtggatttctgagttcaaggccagcctggtctacagagtgagttccaggacagccagggctacacagagaaaccctgtctcgaaaaaacaaaaaacaaacaaaaaataataataataaaaaaaatgtggactcttgccccccccccccaatggtgccaggagatcacttaggaagtttgggcaggcaacagcacatggccataggctgcaccaggcagagggcatgaattagtgacaaaattcatcaatagatagccattgctcttgtcctaaaggatttggggggcggggaaacatggagtagacaccgtatcaccatgtgggtagtgattgtctacaatggatgtgaatgctgtcagcttccttcaatagtgctgtgctagcccaaagggcgctccattagcctgaggggacagccaggactctactaagcaagtgcctgtgtttattcacatcatcggaaacactcaaggagagggaccatagaatatctgggaaatatgaggggtatgggttgaaaacacccagaagaacccagagggtttaggctaagagatcacagtgatgtaactcaggccatccttgtgacctacgtggacttcggtggtggccgagctgggttgaatgtgatgttataaagcgattacattttagattgggttcctttgtcagtgctgtgtgccccgagctcttatgcagaactcccctgtgaaatcaaacactttttattagatttgattttgacacttcacagttttaggtgttcaatacacgttgctgagttaaattggatttctgaacagaaaaagactttacaattcagatgagatgcagccaatccttttaatgtgtttatttcgacatggtgttttacattctcctgcactcggcagcagatctcaggttgattttcaccgacttaatgtctacacacagtctagtgatacctacaaagcaagtttattacttgagggactgtctgatgtgggcaccaatcaattctaactgaaaatagagtgagttttattatgtaatctatgagaacacacttttgaatttgtgtcgcccatgtttatggacaaacagatctaggagttggaaaattctagcttatgcctaatcgattttggctggtgtacttcaaataaacattattgggagaaacaaaattaaaaaccaaacaaacaaacaaaacttttgggggggaattgggaggtttggcacagggtgtctctgtgtagcccgagttgtcctggaacttactatgtagatcaggccggccttgaacttacagagatccatttgcctctgctggctaagtgctgggattcaaggtgtgtgccgccactgcctggcttcttttccattaatttttttgtgtgttggtgttttgcctgcatgtatgtctgtgtgagggtgtcagatcttggttacagacagttgtgagctgccatgtggatgctagggtttgaaccctggtcctctggaagagcagtcagtgctcttaattgctgaccatctctccaatcccaaacacaatttttatcaacagcactttgaatgctttcacttgcaaccacacagctgtgaccctccaaaacaaacacatacgcattataagcagggcacaaagtatttggtaactattctttcctatgagatgttagtgtcttatcttggaaggggtgatcttaaagaaaagtcccttaaacttgttctctttgcacagaccacctctctctgagttttgcctgtgctttttgtatgatgtggttaatactctttaatagcaaatatttccctttgtcctcctgtgagtatgagatttttttctctgaagtcattatttctccttttctggactttgctgatcccagattaggggaggagctttagggtcacctattctataccttagagtttacttatgataaagcttgagtaggaatctgcttgtcggtggcagaggactggatactctgacggcccttgacatctatctcagatagacatatctatcgtactgattctcaacattgctttacaaaaaacaaaaacaaaaaaacccaagcaatcttttggacattttgaccacatgactatcatgatcatttgccacaatccacagtgacttggtctggagcagtcacataaggtccttggagacctggggtatgtgggttttttggttagtggcattctctgagatgaccttgctcttctatccactggttaaatatgacctgatcacttagcttaagtagccctggaatataaagtatttgatagtgcaggctgcatggtgggtgaatgcttagagttaaaatgtaactgtctatgatgttatataatttaaatgtaaatgctttcctgtgcctgagtacatccccagaacacgtgggtgtcattgatccaaaacatgcttttacttctgcttttggtgctggttaaattagtgttctcaaagcagcaggagggctggaagtggaagccgggtcccctccagaagctagaatccttgaactgtgccgcttaggcatttggctcattaccccaacgcaggcttaggttggcttctaaagccttggtgcctaaggccacgttgccagggagctgcacttgaatacttcttgtcaaacgatgacattcccaggacagcagcaactattctcttccccacttctgctgagctaaatagttatcttggcgtgaaggtctgaaaatgatgtagttataatagttaagggttaccaatcaaaccaataatgcaaacaactaactcaacagcaaattgcagagttaatttaacatctgtatcattaagattaggtatattccaaagatcaatggaattatgtatataattattgcctgtaggaaaatttgaatagctttcaatttttaaaaaagatttatttatttatttattcgtttatttatttataatatgtaagtacactgtatctgtcttcagacactccagaagagggcatcagatcttgttacggatggttgtgaggcaccatgtggttgctgggatttgaactcaggacctttggaagagtagttggtgctcttaaccactgagccatctcaccagcccctcaattttttttttaactcattgttaggacatgttgagactgagagtcactcagagtgagagattgtgtgatggctgcttcaatatgtgacaatgtggttagcattatgaaaggattctatttggtgtatgtttcttttaaaaaaaaatcagcgcttaggagaattcggaggaaattctggcacactgtagaatgctgagccttgggttcctcgtcccatgctgtgaatagatttggagggtgagagaggaagagccctagccaggagctgtggttcgttctattagatgtttcaggttgtttttttttttttttaaatgttaaatattgagtgtatgtaacagaatgctgtgaaatatttggcaggtgtgaggagctctgctgccacctctgacgcctctcgctgtcttttcttcatcctttcgtccttcctctgcacttgatcttagccaaaaggccgagaagcgattcgtccttcctctgaccgcactccaccctgggtggttttgtgctgtttctctctgcgcaccagccttatctcgtacgcatgatcatccagcatactttaaaccttatccacatagcgtctggccatgtcttctcccacgatctctttattaatattctgtcccagcgcctcgcttgtgtgattgcttgtagttgtcagccactggcgatcagtactaaagcgattccactgtatttatgtgctgtaatttctaagactcagttctgttgacagggacctggggtgcttccagcatttgtcactcagaacgccatggagaactttctgtttgttcttgtttagaggaatttgatttttatttttccttaatatcgtaaggagttttctcatctatgctagagagcgtatttggtgtgtaagcttcctgttagttaatgagattctaaggctgttatggtcatttatgctttacaagatggaccggagggctgggcacgtaacttagtcctggagcatgtgcctagcatgtgtgaggccctggcttagatcctgaactaaccgaactccctaaagaaaattagagaacactcttgctcctcttgcccccatttttttttaatttcataattaaaagtagtttaggtaaggctagaattgttcgtgcttaatttttggtagaccttttcacataaatgtatcttagcttaaggctcttcttaaaaaataataatttttatttctttgacaagttcatagaaacatgtactgaattttgataaatatccatgacatcttctcctccttcaccttctcccagggtctccccagtatgtcccctccccaatctcatgtccttatttatttattttaatctactgagttcccatatgggcatggtcatccccccgcagcctgtgccatctattagttgtcattctctgcccaaccccagaaaagtagctgccccttagcaggccatcagctagctgctcacagctcctcagtcggggctgggccttagtgtggctcctcttggagctctttctgaggtgagatttaaaaccactgacttatatttataagttgttttacaactatcacatgttcctattttttcactatgtacggaattctggagtggctgttgtctttctgtcgccacagtgaagactgtcctctgccatcatctggctttcctccgcaaagcagaaacatttgctgtcagcttagtgactcttttgggaataattcaatttatttcaaaaacattttctcagctgggtgtggagacctacgtcccagcgcttgagagagtaaagccaagaggatcaagagttcaaggccagcctctgttacatagtaagtctgaggccagcctgctttaaaaaaaacaaccaagtctctctttgtccttagtatcctggggttttggaagaatgtatctgtggctgagagttttcttaggtgctgataacactttgaaagtgctgataacactttcaaatcaccccaacgtttgctggcgttgctgtgactgggcgactgggcgaactcagcgttgcaaagttgtatctacttttggaggcaactaaatcctggtgcaggcaggacggtttcctgaggaagttgagaggtgtccattgcaggcttttctccttggctctcaggtgcttccctgagacctgcctttgtctttgccctttcccttgtgccactgtttgtgtctgtgtctgagtgtccccctctatcacctttgacacctgcatttatttatacatctatttatgtataaatatgtggaggtcagaagacagtaagtagttggtgctctccttccatgtgggtcctggggatgggacttgggtatttggcaagtatctttacttactgagtcatcttgctgacccctttgaaaacaccagtcacagcagatggaggctaacctatttcagaatgacctcagtttaactaagtaggtctgcaaggacttcctttccagataaagtcactttctggcctagggcgcagtacttgggaaagcactgttgactgacgccttaaggctctgtgaggcaggtgctgctgttaattgcggccttctcagagtgcagacaaggtctctgagatagcagttccaacagctggttcaagacagttttaaacccaggcagggtgacgtcaaagctcatgctcctatgacttgaagtttccagagaaaagccaccctaaagttttccaagatggattaaaatctttccaagaattggaatgtggcaggagcagggccacatactctcgagatatctttagactccttcgagaccatttattatgcacctttcatctaggttaatcagcttgtgactgccatgaggaacttcttagaatgtactagaacagagactggcttcctccatccaaaaactaataatgttgtggggtgggtccgaaacctattgtagaaggctctccgttttgctttagcccacctatctgacatttggccatccgtacatttaaagattcattgacctgttacttcttttgttctgtaaccactgaaagcctaaaggtgtgcaccactatgcccggcagggggctacttattgagcacccactgtaagacagtatttgactagctggttctgaaaacaaaaaccaacaacaatccatttcccgctaggggcctggtgatttgaggttagtcatttcatactaagctcgacacagatgctgtcttagtgttggtttgaggaggaagtgaatcactgcacatctactgaaattcgggcagcaattgaggaggagaagtctttgcctcaaaacatgaagtggtgcctttacccaaatgggtgtttctccggccaactgcatacaataaaattactctccaatgctagaattttctttgcatatataaatatgtacttgtgaataatgttgtgggaaatattataggcatggggttgagaatatatagtgcttatatatttaaacataaactatttatgttttaaatagttcccattcactttgttgtccattcactttgttttctcttcagaaccttctttttttctgttaactggactgattgataatgtttttgtttaagacaggatcacacttagcctctaagtcattacaatgtccaggctagccttgggtttccaatctgcctgcctcaacctgctgagtgccgagttaactggctggagcccccatgctcaggtggttaagtagattcttggctactgctgagaggaagcctgccttgacctgatttgcttcttagagacgtcttcagagaagtcaaagtcatgcttgagccagcatctcgtggtcaaggagatgctcccattttatggggcttagaaaaggaatggaagagagaggccatatagggaagttggagagaagccatatcttaatgctggctttcacaccttactaggccaagccactccctgctaacttcctttcctgctggagactagggcgtggtctctgttgggaccagcagagagaagaactgagaatctctgaaccagatggcctgttcactgtggtggccatcaccaggaaagacacagttggaacaagagaacttgtgtagagggtgtattgtctagactgttgtcttagatcctgggggtaagacagaaacttgaggctgcgttggtgaggttagcctgttctgtcaacagtggagaatttgtggaattattttctcctggtgttgaaggagagatggaataacagaaacatgaattaggaatgtcatttcagcccgttctgtcccattccatgttacatcttggccagccccaagaagttctgttccagagaacatgttcagtcaggctggatgtcctcctgggacattcctgatcactgcctggtcctttttcagtccctgcaaggagaataatctttgatggcatccttctgtcttttttttttcaagacccctccccatactggggattgagcctggggccccatacacgttaagcgaatgatctgtgaccaacctaagctttcaggtccctttcctaagtaattaagttattagatgaacattttcaattttgagaattcagcatcctttccatgaagttgtagactctctttggtgacaacagtgaattattcttcctgagtgcaaggtcatttgcatccggccagcacttcttgcctgaagaatcttaaatatgaggtatgctgcctgcaactgtgtgctctgattgcaacctgcaacattttgcagcaagactatttattgagtacattcagagtggccggagagcagctttttctatgtgtactcagggtgtgtgcgtgagtgtgagtgtgtatgtgtgtgtgtgtgtgctaatgtgagtgtgtgtgtgtgtgtgtgtgtgtgtgtgtgtgagagtgtacaaactaccttcctggttggctttgcctgatgtcacttgcatcgatctaagtgccatgtctcataactgttaggcagatgtcccattttcagatcccaccatccatgtcaggcaatgcacactgccagcatctccagctacaggggaaccttcttctggcccgatccccagcatgggattggaaaagaaaaaaacagaaaccaacaaaaaatacggcgataacatttggttttggactctgagatgaatcactgtcctgacagtaacagagatgaactggatgctggttgcaaaacttcccttcttccttctgcagatacttcatgagctaaaagattcctaaggtcgactgccaagggcagtcataaatatcactgcctctctgatagcttgatgggtttttatggttgggcgtggtcatgatggagaatggggaaatccccaagaagatggcttacttggcagcagccttgtctcgttttctcctcacttctagtttcaaatgcctgttggtttagaattaacattgtgctgtcccctttccaaatgatggactaatgaagatgtctctggaaataggaattttatagccaaaaggaagggagcatatttgaaattgaaatagcatatactagggagttaacagttgctttagatggattgttgcatgttatgaccttgaaactgcatttacttcctatcttctcacttgttgtcactactctttgcttgtttttcaccctttggaaagaaatcttaggccactgactcactttggggttctctaattttctgaaggcctggggaatctatgtgattttctcaaatttttatgtttaaaaacttaaatgtatgtgtgagtgtgagtgtgtgtgtgtgtgtgtgtgactcagatgtgggttcctgcagaggccagagaaagggtctcccgaatcaggagatgcaggcagttgtgagctgtctgacctgggtgctgggaacggaatgtgggtcttctggaagagcagcactgagctgtttctccagcctcttcaaaagactttaatctgtcaggggtaggcaggcatctattgacctgtttttctttcttccccttctgtgactagaagcccccggaggctgttcctctgcctggtttctcttgagtctcagagctagcactgaaagcatgcatggcaaacatcatacactcctttcctttttaactggataaatgaacagagggagtaggttgccatttgaagtgtcttaaaatggcaagtgtgtgtgtgtgtgtgtgtgtgtgtgtgtgtgtgtgtgaagtgtgtatatgtgtatgcttatgcatgtatgtgccacttggatgtgggtccttgcagaggacagaagacggctctcatggagccagagatgcaggcaattgtgagcctgacatgggtgctgggaaccaaatgtgggtcttctggaagagcagcaagtgctcttaaactgctgtaatcccccagttactgcagagaaagttctgctttactttgtcaaacagataaggttcctgggaaggcagctttctgtcttgactgtccatccggtggtttgtccaccctacctccggctttctcaaagctgatcatcgtgtaaggcttctcatcgcccattgtccgtccagtgggggaaaggactggtctcaatgctcaaggcttccatagaatagagagcattgggcacgtcagctagtaccttctgctcaagcactgtggagaagagacacgagataagagattgcttcactaagcaggaagctcccgtcgttcctcagaggaggcaggtgatgtttaactgatgtagaacctggtgagagatggcttttttagacaggtttctctatgcagccctgcctcttctggaactcactctgtagaccaggttggcctcaaacgtaagaggtccacctgcctaaggtgtgtaccaccattgtccagcagttggttttttgttttgcttttttgttttattttctttaatatagaagcaaagcaggataaaaagacaataacccttagcttcccgggaagaaaaggacactctcacctagaaatgtggtcgaagcttctgtgatagacaggaattctggaccaattatctaaagtcacctcaggcatttccttcttccctgctttaaaccgcaattatcccagatcttaccagaaatctccctttctagctcttgtgtaaccccagtggctcctgctttttttttactgtagtttccaccaagactcctccggagctgccctgtaatctcatgtatcacaaaaagagagaaaaggtttcttagccaccctttgagaagtaacttgagccaccaagatggcaactagggctaatgttcaaacacttcactgtaactctcccttgaggaggccacacccatactccattctttcctgagcgtctttctagttttcacaaactagctctgcttcatactggcttgtcctgaaattcttttatgaatcaaagccaaggatgtggtttcaccggaacaaagggcctaaaagattaagggaactcttccggctgctgaggggccagtgatggctaataggcccatctctatccctggccactgacagaaggacattgggacacttcgattctaatggtaccttaagaatgtatagtctggggctgaagaggtgattcagctgtcaagagcactcgctctgctgttccaggggatctaattgttctggcctctgctggaaccaagcgtgcacacagaactcaggcagacactcaggcaaaacacagatacacatgaaatctctttctgtttttgctgttgactgcacagtagtatgtgaagggtgctgcagaaagtgctttctgatgaaccctactgcagaacacagaaccaagttaagtatgaggactgatcttcctgcctgcccaccctttccacctcccttcttctctccctctctccctccattgcccacagtcttctgccaacaagtactgactggacatctttttatcccacacaatcactggggacccagtttggatgttacaagctagtaataacaaggaaaatgtagtcacaaactgaggtgtgtgtgtttataagagagggatttgattcacactgccctagagaaggcatgtgtgaagtaaatttagtaatactagcctgaaaatcatgtcatctagagtaagagttgacatctgtgatctgtaggcccgatctgaacgtcaactcttttgtgtcaacaccttctgcccaggtatccttctctgcttctgtcaatgaagggcagagacaaatacatagtcatggcagaaaccatgtgactggcagagcctgcaatactctaatattttgcctttcacagaaaaatcctgctgccctttggtccagaaaacacacaagaagaggatctataagccggctctggtgacttacaactagagtcctggaatttgagaggctggggcaggagggttgccataagttctgggccatcctggggtatagagggaaaccctgccacaaaaagaaagacagaaaagaagaaatatagtatttagtttgacccaagccttccttaacaccttggtctatatcatctcacaaaaaagtcattgtttctaacccaatgtatttttttcatgatgtttcatctcaaaagtgatcgtttgtaaattgttctaatttcattctcttgccataataaaacactgaccaaaagcaactccaggaggaaagggtttattaggctcatatttttgggtcataggccatcattgaggggagtcagggcaggaacttgaagcagaagccatggaggaacactgcttactggccatctcatagtctcatgcttagatagctttcttatacagcccaggaccacctacctaggaatggtatgacccacagtgggctggaccctcttgcatgacataataaagcatgacaggcctctacacacatgctcacgggccaatctaggtggtgcctcaaatgcagatctcttctcagacgatgctctgctgtgacaagttggtaattaaagctaacgaggatgtaaattatgattccaagatcttttgaaggcgatttcataatattttgaagtttttagtatgtgtacaaaattatattttctctgtgtgaggtgtttgtctccgtttctctggctcccatcttcccctcacctcatcttcctatagtctaggcattcttgggtgaccttttcttgtcttctgtcacttggttttacagtccacacactgatcggagaattacaccttcctcttcctgtagtccattctttcctgaagctctggctttggtttctgacttgtaaaagaatgtggccgctggttgacagtgattctaaacgcacaattgcattgtgggatatacccactgttcccagcacatggctcatgcactgtgacaatgtcatgagaataaagtgtggagaggccaagaaaacaaaagtcagagtgggtgagacagaaaacaggtagtggaatttgctcagtttctgtttgggaccccattgcctagtttccacaagctacagtgtcgttagggaaacagaaatcaaactggtatcctccaacccaagtgactgcagaagagggggcactgaataaggacaccggagctagagttatctctcaatggcgtgctccatggctgtcatttgatagcagcaggagatggggagctgagtggcttacccagggcttggaggaagagggacattgataagagccacaggccagggtatgatgtaaggagtatgaagccaagtggtttcctctgagttaagtgtttttcttttttataaagaagtctcatatagtatatgcatacgcacacagtttgtatgaacacataactagctcacatcataaaagctaggttatttttccttgttccctccttctgttcttccatgagcaatgataaataaactctgtatcatctgtgttttcccatgtacttccatgataaggtttgctgtgtggttactgttataagatcatcctgccttggtgtttcttaccccccagtgcagccttgtgaaaacctcttcttgttaaccgccacggctcgaactcagtgatcagcagattataatattccgtggcttgggttctacattggtcagccttgttcctatcaatcgcctttccttgtttatcctcctttggaaagattcacaattatattaacatgactatgtcaacgttgttgtacacacgtccccatattcttatttctaagaagctgcgcccaggaagtgtggttgttgagtaaatgaatttttaacttaataaatgctatcaggttaattttcagcgggactgtaaggtttcgagtttctatggtctgcaagagcactcgttagcagtagctttgcagtaggactttctgtcctttgtctgcatccataggttgacaggttaaaatggacctcctttttattttagtggaccttgcctaactgctgtgggatcttagcatcttacctagtggttgtcaacagttcctttctgtgagtcttccatttccagtctcacccattcattctcccgttcttttgttttattattgttttacaatggttctgtgaagatttgcatattaaccctttgttcacctccactaatgacatttcattcaagtttaccattcatgttaccattaactcatttatgttagcttttacttagaatatactttgccatgtgaagatatctaatttttaaaaaagatttattttatttatgtaagtacactatagctgtcttcagacacaccagaacagggcagctgatcccattacagatagttgtgagcccaccatatggttgctgggaataactcaggacctctggaagagcaaccagtgctcttaaccactgagccatcttgccagcccagatgtctaatttttatatagtcaaatatgtctattttttcttttatggtttttggattttttgcctttgttgagattttccttaaccttggattatatgtgtaatcttcttatttttttaaaagatttatttatttatttcatttatgtgaatacattgtagctgtcttcagacacaccagaagagggcatcagatcttattacagatggttgtgagccaccgtgtggttgttgggaattgaactcaggacctctggaagagcagacagtgctcttaaccactgagcaatctctacagctcccttcttatttggttttttttaaattttttatattgctatattttaattattgtattttatgtgcacgagtgctttgtctacatgtatgtctgtgtacccacctgtgtgcctggtgcttgctgagagcctaagagagcattggatcccataggtggttgggagagcatcgtttgtggttgctggacctgggtccaggttgtggaacctgggtcctctggaagaacagctggtgctctctgccatgcgccatctctccagttcctcatattgatgtattgtcaccctgaagtctctcagctctgtggaaatcatgtgatgtatacctgtagtctactgtttttccttaagaggataaacagttgtatcagcactgtttatgaactaatataacttttccaccgaatattaaaatatgcatatatcttaaggttatctgactattcttttctccactaaatcatatccttattcccacatggttgcaattttgatttatggtagattataagtttttgttatgcaatattatacctgatatgaaaaatttccccatataattgatttacattatactttcttcactattttaggcatacattttaatttgtgaacttgtgcttattgtagctaattagctcctaatgcctgccgagagtctaattgcaagttcattaagctataaattatttttgaacaacaatttgaatgatcatatgtcatagtctgtgggtgatattagaaattcactttaaagaccagacacactcagaggctggaccgggtcctggaatgggtgttttccctgctttggttgagtttgaggctgcagatcagctgtgactgaaagaggagaaggaaaagtgcttgtggctgtagagagcctaccaaatgccaggttctgtctccagtctcttcctcatggtatgttcccaaacacacccaactgagatcacaggtaggtagtttctaaggtcaggaacccactccatggaactctgttggaggtctctgcgtctggacctaacataacccaaaacgtttactccaggtgaggttgaccgctccagaggttgggtgtctaaagcaggaagtactgtttgcaagcagaggggtgtgctgtgtggtttgccttcctttgctgtggacactcccacttgccacaatttgacctgcacatgtgcaacttgcctcgctggccctcagctacatgcactgtagagcaagcggctgtgcatccttttaccaaacacagttaagccattgcttcatgtttgtgcgggctgctggggagccagtggtgagcatctgtgggctgattcccacactcccgttgctattcctggttgctctcttgatgatagtaatgcttgtttttaatttaggcattaagtacactcgctaatacactcactagtcatctagaaatatggacttagatgaaaagtttcatattaatttgatcttaattagaaactcagcatcggtgtggatcagaccaacattcatttaacagacatttattgcatgtagtatatgccaagcacagttatgggctaatgattgaaatgaaaattacctgtaaatataaatacaaatgattaacttagataaatgtaataaacactgtgaaaaacaatagattaagggagtccaggcgtgctgggcatggagaagtgatggccctggatgaaatgtagagtaaactgcattaaatatgcaaacttaattaagggagaactgtgcctagcctagaacttggaagaaatgtggataagtagagaggctgtgttactaagtaaaattttattttattttattttattttatgtgtatgagttttgctttcaggttagtcagtgcatcgtgtgcatgcctggtgcccacagaggccagaagagtatatcagatcccctgaaactggagttatagatggttgtgagccaccatgtaggtaccaaaggatgcaccagggtcctctggaagagcagtcagtgcccttaaccattgttcctgagtaatcttaatagtcttcctgagactccagttcaacactgtagtcagattggcttccccctctgatctcttcatagtgaggcctcaagtccattgtgtaagcctcggggacctagtcaaagagcatccaacccatagcattcagtttgagagaagagtcctgggcagacgtgatgatttcccaaggacacatctgtctgccttcaagactgtccacccatggagcctaagccgtgcagggtacagtaggggaactgctgtgtacgagggtgcccatccgccagcatgggaaatacggaaggcgtgaagcaaggtcttccagacggcttccatttgattagttttgatctgtaaacccacactatttaatacacagcggtttttaccattatcagtaatgataataagcccagaatactttatatgctatcatagtcatttaataagtaaacactgctgtgttgtagggtaattgaggagacattaagagcccattctagttctgtaattccactgtgtcttttttaatcacaaaaatactgtcaggagcgatgcatacacaagaggcagtcactagctcactcctataaaacaccctcacacaggaagcaagttacacggtctcatctagtcaacctttgacccatcctgcaggggcagagggttgttatggagggggtggggggctcttactctgtttaccacaaggagaatctgatcagtggaccaactctttatatagttccatgggatgtaattatatcatgtaactcgaagttttagccattatttacaatagataccagaggcacctacatttatcaacctctttggctgtttttcttttcagcagagggtagggatcgggtgaacaagttgttgctataaataaagcaggttgttgtaaggcttgtgtcctgattggagattgatttcacctcctgtgtccgttggtagttagcaattttctaccacactgagcagggctattgtaattcagcattggcagagagaccctcaaagttaaagctgcattgaggcctcgctgggcatcagcagggtcagtgagagatggccttgtgactttgagagtcttaatcctgaaccaagcttaatttatatatacttcttacaagtcattttctttctttctttctttctttctttctttctttctttctcttcctttctcttccttccttccttcttcttccttctttctttctttcttttcttcctttttttctttttaaaaaaattttttgagacagggtgtctctgtatatccctggctgtcctggaactcactctgtagaccaggctggcctcaaactaagaaatccgcctgcctctgcctcccgagtgctacgattaaaagtgtgtgccaccacgcccggcttctttctttttttaatttaatgttttttagcttattcattttacatcccactcactgccccccttctgatcacccctcccacaatctttcttccatctacctccccttctcttctgagcaggtttgtcgcccccacccccacccccgcgccattcctcccctcccccctgtatccccgcaacctgtcacttcaagtctctgagaggttagattcttcctttcctacggaggccacacaagccagcccagctagaaggacatggacaggcaacagcttttgggacagtctctgttccagtttttttggtacccatataagaccaagctacacatctgctacacatgtgcagggaggcctaggtccagcccatgtatgtcctttggttggcggttcagactctgtgagccccaagggttccgaatagttgactttgttggtcttcttgtggagttcctgtctcctttgaggcctataatcttcctcgtattccaagagtccccaagctccatccactgtttggctgtgggtgtctgtatctgtctgagtcacctgctgggtggagcctctcagaggacagcatgctcctgctgactgtaaggttcagtatccacaggtctgatgaggtttgggtgacatgtggcgggagaatggaggttccccctgtgtggttcaggagtctgatgaaggtggaggagattggaggtccccctgggatagcctcattttatttcttatttatgaagtgagctgtgctctgtgtgtaatgataaattagagccttctttactactatagaatagatgcatttcccagattgggggggggggcagtcaggtgtcaaggcaaaaaatctctgtgtaacagccctggctgtcctggaacagtagaccaggctggccttgaactcacagagatctacttacctctgcctcccagagagttgggatcacaggcatgcatcaccacacccacccaagatccatttttaaaatgatgttttagcttcaccagatgtacaggtctgtcgtgtgttctttgtgcctctgtccccactgggactactcttaaaccctgagttccactgatccataggcagacattaaccacccatggttactgagcacctgaaatgtctagactgaggtagtgtgtacgagtgaaagttacatcagatcccagaggcttggcgctaaaagaggctgggagacgtttcttcaatagcacgggtacagttagccttacttctgtctctggtgaaatgctcatgaaacaaggaagggtttatattcttcatgattttggtgcatcctggcaaggaggttgggccagggcagctcacatcctaacatagaggaagaccggagggagcagaccagggcacgtcctctctgtccttttctgttcttttgttccaagtaggacccaggtatatgggatgggtgctgctcacagttgggtcttcccccttagttaatcctgtgggggaagtatcctcacagatacatggagtagtgtactttactaatgtcccaggctcttttcaagtcaaccaaggtgacaagattcaacatggtagggctggagagatggctaagaggttaagagtactggctgctcttacagagaacccatccagacaatggctcacagacattcactaacattaactctaattcaggggatctgatgcccttttctgacctcaacaggcaccaggcacgcacatggtaatcatgcatacatcctagcaaaacaactccccacataaaattaaatcaatctaaattaattaattaagttatagtttatttactggttgcatactttagatatttgtgagtaagtgcaatgtgttatcaaaatgaacttctacctgttttattttttgatgtggatatagctattaataaatttaaaatggaatatgtagtttcaataatctatcaactgatggaatgctagaatctgtttgttttcccatttcccctgttattccctacagaaagtctttagaacaatttattattttttgcagcttggagaagtgcatgtgtatgtatatgtaggtgtatatgtgtgtgcatgtgtgtgtatacgtatgcatatgtatgtatgtatacatgtgtgcatgggcatgcgtacacatgtgtgtatgtttgtacgtgtgtgtgagtgtgtgtgtacaagcatgagaggtggggaaagctgcacagggagtgaaaggataaaggagaagcagctccttgtttgggcactggtctaagatgccacctaactgtcactttaagtaaataacaaagaatagctaagcacaaatcaccttcccatagggcagatttactctttgttccaaagtcaatggggtcattggggcacaggatcagcagcattataatgcagacacacaacagacagagagagacatatgcacacagacacacacacacacagacacaagacacatgcacattcacacacacagacacatagacatatgcacattcgcattcacacatacagacacacacagacatacagacacacaggcacacaacagaccgagacatatacacacagacacatagacacacatgcacacacacacacacacacacacacacacacacagtgctctagcatagaccgaagcaggaaattctaagaattattttcatcccttttcttagttaacatggatgatcaaagattgccctgtatgctagctgatagttttgatttgggcaaattgcttataatatatttggttctatagcattttattaatgagaaaattctggctgagaaagcctcacagcttaatggccttgattatatgtaaacagatatgatagggtttttttctggagaactggatgattttataaatttcactacattggatagatgttgcatgacttctatcaggtggtctattttttttttttttttgcaaaggaaaaaagggagggggggtcacatttaagcacccaagcccgagtgactaagttaaggattaaatgctctaatgtgccagttttattataaccttgtcatagagcataaaatggcaaactgcactatttttgctgttttatgagctcagttaattagattgcccatttgatgagctcagaaataacacgagctgatgttcaggacagggcagggcagggcagggggaaccagaaggcagagaccgtacacactgtcctgtggaagcattacagaaggcatgctgtcatttaatgcattctaatggctacactggtgacttcctttagcccagagacggatgagccagggggtgggtgctagaaggcaaggaaagaaaagtgagatgtggccttgactctagaactttctgcctgacaatatgaaaactgtcatggaaatgactaatgctgctccagcatagccctggtggggatagaatgacgtggctcctgaccctgggactgggtcagcaggcaggcgtggacctccatgagtggtgatggcttctgtgggcataaggcgtgtgtgtataataatgtacataatttacattcctccttcaaagaatgtcctctctgttaatagtaatgactccaagatgatcagagacagcaggagtctggaggcgaaggcctggctaacatctgaccaaaatggtaaacactgggactttcgggacagcccttaaggctgtagaagagaactcttaaaaaacttgagttcaaaagtatataattaatgataccaaaaaaagatgcaatatgaattatatgaggggcttcgtgaatctaaaggaacaaagccagctgcattaacgagccagtttgccagaaagatacaaagacaagtagatataaatgcaggcagattcctaagtttaaggtcagcctaggacacagtgagtccaggcccaggtgtgctatctactgtgcttaatagaatcaggcagatctctgaattcttttgaagtgttaaaagaaaatgtgtgcttgctgtttcctaataattaaggggcttgggtcactggatgctgattcttaggatattcaaaaggaaacctgaagtaaataactggattgatatgtaaaataaaagactgggtttaggatctgcaggagataagctatccaaagaattgtttagaatagcaagagagaactgcttagagaactgtctcaagcagagactagcaagagaaagtagtttggagagaggactgtttgtaggtctccagagaaagaagatcagagactgccagctcccaaaacccccttctctcagaatccccctccaagctgatcctggtccttggcacactaactatatgacaaatagctattcttggagaggcttagtcagcctcttatttgaaattagacacagagaagcaaacaacccacctcaagccccacagtagaagtggccgtcacaactgctctgtaatgaaggttacaatacagtaatgatggctcacaggatcatctggccttatcgccgatgagttctctaccttctctcaccttgctcagctttgacgaagaagctgatgatagtcatactttgacaggcatttgtaggaagcccagaaatactgcgtgatcactaggtttgctctctgttcaagaagagctcagccctggaaggaggcggtggggccttctgtgtgacccccactagcagtatctctaaggaggtaagacaagaaagacctgtttacgtaactgccgtaactgccggaagggctaagaggagagctgggctcaaggtctgccttcctcccagggtgagaaagctggcttttctctacgccgtcccatttactaatactaattgcttcctggctcctgggcacagcccctacctgtggggaccctggaacgccaggctgtgagctagcaactggcagtgttcatagttgctctcttagatccatgggggctactttgactctagagatgtaaaaaatagctcatgggtcctgaagataagtaagtgtatgtatgnnnnnnnnnnnnnnnnnnnncctcctcctcctcgtgattcattgagacagaatctcaatgacctagcactcaccagcctcttgttctcagcagtcttctggcctcagcctcctgtgagtgcctaacatactttaagtgctttttgttttttttaaatcagcatatgtctttcaaaggacagttaatacattttataactgttaagtcagaaatacaaaattccccaatagctcttttcatatctgtttttcttccagtcactctacattttacactgctaagtcaggatgggtatataacgtgatcatttttgcaattaaaactatcctacttttccatgaccttcctagcttggctgtcatcacattccaggcaggaattctattgctgtaagctagttagttactcaagaagacatctttggcctttcctgaaaataacttaaagtgcttaaaggtttttttttttttttaaacaaatcacacagttgagcccaatgtaagctgcattaagagactgctttgtgagacaacacacatgaatacagaatcccaggccctcaaaaaccccagcagtcaaatgctcgccaagtgtcttttggcttaaagcagttttgagaatcagtgtactgtgtgggatcggctaacccagaaattaaacacttctctgttggcagaagcgctcctcgtcatgggtcaggaatgtagatactgtttttattggtttatgattgctggggttcccattgttgtaaaatgacccagtccctaagaatttgagccctaaacagttttctgtccctccaaacctaaggaggacatcatgaaattagcccatgttgtcacacttgtggtcagagcaggcgataggtttccaggctcttggagcctctctctctctctctctctctccctccctccctctctctctctctctctctctctctaagatttatttatttatttatttatttatttatttatttaatgtatatgagtactctgttgctgtacaaaggttgtgatttagccgggcgtggtggcgcacgcctttaatcccagcactcgggaggcagaggcaggcggatttctgagttcgaggccagcctggtctacaaagtgagttccaggacagccagggctacacagagaaaccctgtctcgaaaaaaaaaaaaaaaaaaacccaaaggttgtgattttgaatcaaatcatgtggttgtgggatttgaactcaggacctttggaagaacagtcagtgctcttacccgctgagccatctcaccaaccctcacatctctttttcttaaggagaaaggagagagtatagtatggttcaattgaattttttaggtctttgagagaaagttataaataaggaaaagtgaaatatattactttagataagctagaccataattaaaagtttcaagtaaagtcaggtccattttgcagttgagccttacatcagactagaactttgtcgtctgcctattattttcattcccacttgatgtcctgatagaatgagttatttattgctatgaccctgagcatatatatacatatgcatatatatannnnnnnnnnnnnnnnnnnnnnnnnnnnnnnnnnnnnnnnnnnnnnnnnnnnnnnnnnnnnnnnnnnnnnnnnnnnnnnnnnnnnnnnnnnnnnnnnnnnnnnnnnnnnnnnnnnnnnnnnnnnnnnnnnnnnnnnnnnnnnnnnnnnnnnnnnnnnnnnnnnnnnnnnnnnnnnnnnnnnnnnnnnnnnnnnnnnnnnnnnnnnnnnnnnnnnnnnnnnnnnnnnnnnnnnnnnnnnnnnnnnnnnnnnnnnnnnnnnnnnnnnnnnnnnnnnnnnnnnnnnnnnnnnnnnnnnnnnnnnnnnnnnnnnnnnnnnnnnnnnnnnnnnnnnnnnnnnnnnnnnnnnnnnnnnnnnnnnnnnnnnnnnnnnnnnnnnnnnnnnnnnnnnnnnnnnnnnnnnnnnnnnnnnnnnnnnnnnnnnnnnnnnnnnnnnnnnnnnnnnnnnnnnnnnnnnnnnnnnnnnnnnnnnnnnnnnnnnnnnnnnnnnnnnnnnnnnnnnnnnnnnnnnnnnnnnnnnnnnnnnnnnnnnnnnnnnnnnnnnnnnnnnnnnnnnnnnnnnnnnnnnnnnnnnnnnnnnnnnnnnnnnnnnnnnnnnnnnnnnnnnnnnnnnnnnnnnnnnnnnnnnnnnnnnnnnnnnnnnnnnnnnnnnnnnnnnnnnnnnnnnnnnnnnnnnnnnnnnnnnnnnnnnnnnnnnnnnnnnnnnnnnnnnnnnnnnnnnnnnnnnnnnnnnnnnnnnnnnnnnnnnnnnnnnnnnnnnnnnnnnnnnnnnnnnnnnnnnnnnnnnnnnnnnnnnnnnnnnnnnnnnnnnnnnnnnnnnnnnnnnnnnnnnnnnnnnnnnnnnnnnnnnnnnnnnnnnncatacacacatacacacacacacacacacatatcttccccccccctttttttttaacctagaatgattacatctggcttgcctgcctcttgagattgctatgggaatcaaatgagatattgattgtaaactgttgaacctgataaggcaaggtagaggcagctgtcaatcatcggtgatgacgatgttggaatgctgccagagagcgtcatcgtgacccgtgctggaccctgcggcagtgccaggctaggatttgatgaagtgatgccagttcatttcagcgattcattctctgagattgacctggtctggtcaccatcctgccacattctggttgtggaaagtgtgctttcacagatgagggcatgactatggtgtcctgggttcacagttttttaaggctttgaaaaaaaagttaaagcaaaggaaactgagattatttgtcccagagaagagaaggctgttgcctagagaggccaatgatcacatatccaccgcacacgcaaacgtggaaattaatccggcgtctatccgaggatttatatccagtcagtggctgcttctgaaaagaatggggaggggtgctcatgggtttagtgccttttgactgatctcaagtggctaccatcttttccatatattctcagatccatctcgtccttgtaccatttttaaaaaacttgttattgtttctttgtgannnnnnnnnnnnnnnnnnnnnnnnnnnnnnnnnnnnnnnnnnnnnnnnnnnnnnntttctttgtgaatttcacatcatgtaccccaatcccactcaccccccctcatgcccagcccccactcttgcaattcccccctccaagagaaaaaaaatcttgttgtgaaaacttcagcatgtcacagtgtgtcccacagtatacccttttgtccacacttctttgcttgcaaatttttattgtagtgagtcattggtctggctcaaggcctctggtttctgctactctatccacactgaaacctcactgggtctcctctcagatatcctattgttgccctgtgtcatggaaatcttacagtttgggatctgtaggaccagccccttcatgcactctaacagttcatcaatgggttggatgttggggtgaatcaattcaaaggcctggatctgggcctgagaggtatctgagctggtcagcccatcagctcttctgtacccacacactacagggatgagctctgctgccttgccctggctggctcatctaatgctgtagccagtaaatggctaggccagctctcttgctctcctgtcctctggctagcttgcccaggtgaggtacagggctctctcccccaagcgctacagcgggtgaggggcggggacagctctccttctctcatgatgggaggggataactcccttgtccacacccactgcactgcagacaagaggcagggccatctttccatgtgcatgtcctcctggctatttcatcgatgggttggatgctgtggtgagtcaattcaaaggcctggatctgggcttgagagctatctcagcacctacaactcctcaaccagggcagctgcactgtgctgcctgggtgatatgtggggcccactttccagagtattgcagctggctaggggcagggtccatagcctccagtgacagcacaggtcaggacctcaccatggccccaggtggcatcactggctactcacaccagactgatcctcactgccctcagtttccaattctgcccacatccttctgcttctctttcatttctccacctctaacttgctcctcttagtggtcctgcaatctcagatgagctgtgtctcatctagggcttcctccctgccccaggagccagttcgtactctgtaccatttttaaatattggtttggtaactacaagttttcactgtattaagtgaatgagcagctgacaaaaaggacagttctcaacccgctgatggggaactaggtcaccaagaccctaaatattcaaccctcacacttttctatgtctgattcttctgtgcatctccccaccccattgtgtctataatccactggaacagatcaccctggctccaatcccagacatgctggactacaactgggaaatattaaccattggtgcttctgatgtctgagaatcacaggcccagtgctgcagcagaattcttctctaagtgtgtcctgagcctgcagcgcgagcatcacccagaagcatagcagagatgcaaactcttagccccatctcaggtccaccaaggcaggcctgtgggagtagactacttagcaatctattgactaagtcatctagggtaccctgatgcttattaacatccgtgggcccctggcatagagctatatctcttctgtagctcttttaaacagtaagggagggacttattaagatagtctcgtaatttgcatctcttgggttatgtctctaactatggaatttcagattagaaggaatcgtatgagatttaatctaatactctctcaaccattttaatccctccctctcttccctcattccttgttctttgatcatttgataagtcctgcaccattgaggaagccatggttaatataaggatcagcccttatcctcttaaagcttactggatacaggagaggcatgtctgacatgcccatactatctataaatggtgactgctatgctggggagacttcgaagctgaaaggattttctaaagggatctgagtgagtcctctatccaggaactaagccatgacaggatgttgactctaggagccgaatctacatgaggccaaagctcttcttattgcaaatcttcacagccacaaaaatccaattcctctagatttctgtctccaaggctgtgagatatttgaattggtttagtccaattcagaaatactctgcccttttccccttcatttaaaaatatttgcaaccgggctggtgagatggctcagcaggtaagagcacccgactgctcttccgaaagtcctgagttcaaatcccagcaaccacatggtggctcacaaccatccgtaacaagatctgactccctcttctggtgtgtgtgaagacagctacagtgtacttacatataataaataaataaatcttaaaaaaaaatatttgcaacctattcgggcgctctgcaaagagagatcatatagaaagataagctcaggggaacaaatttcagaattcacctctgactttgctataacccacacatctgaaacccaacctcactcgctttgtggatgacatgttagacccctgacgctcactgacctcacagatacagagaaacccaggcttaggggcagtcttcaagtttagtagaataatgtgcacctgaggaaaagattccatcttcttgtagaatgttcaaacgtgcacgtatatgcacgtttcggcacgtatatgccgaaaaaaataaaggaagttaaagattagaatttcacaaaaagaatttacttatcagtctattgtgtagggtatgtgccacatagttttgtggtcatgtttttggaccaagttctaaattcatttatccatactatattatattttagattcagggtctgtaatctagtagagtgtggagacctgggagttaaaaactttctcctttttgtctttaattcctcagggcttactgcagtttgtggtatgttagttaataggtaaataagatttgatatttgatgtattgtgaagatgtgtatgttttccagggaatgggcaaagcattaaggtactctacagatttccctccgtgatgtcagtaacctcagctctctgacaagcacacatcattttttttaaatgtttttttctgggtccatttgcagtatcagccaacctgaacttcatcagtgtcaaaatcgcgaaaaccgttgatcaaacctagacacaggatgtcttcaacagccttctaatcagccaatctaatatgtttatctgaaagaaatgaggccagtctgcctccacttcttctgaagaccgccgtttccttttctctgttgacagtcttttagtttttattgacaagtcatgaggcatggctcatctatgtggttttcttctgtgtggttacaacttcttacaaaacagttttttccccactagactttttttttttttaatttttagaagtagtctatctcttctgaggaagttgtcgtgttttgtattctcacctagagcaaccaacactggacttctgaaatgtgtacatatatctctgacatgtccatcttttctgcctgataggtctgtgtccactagcaaggacacatatgatgagagtaatggatttatattttagtctaatggttttctaagatgtgtttcgggggtgtctagtaatgttgcagtttctactcattacctcaagttagcccctataatgtagtaatagatctctatttaggctggtcatatatagtttttaaagcaaaatatactcactgccactttagtagtgtggacaccagccattattaaatctagtgggtaaatttacattatttggctttaattttagtaatgtaagttcatggtctgtttagaccttgactggacagttctgaaataaagagtttaggctcagcagtacctgccatatgaccaaagtcctgaattccatgattctaaactttgcaaggaaacaccccttgcagataacttcaaacattagtctgtaaaacacacgcgttcacgtgcacacacacatgcatatataaatataatatcttttgaatataatattttttaatttaattttagtgttttatttattcactttgcatcctgctcacagcctacctcctggtcaccccctcccacaatccttccctcatctcccctccccttcttctctgagcctgtgggaggaccccctaggttttcccctacccccaccctggtacttcaagtctgtgcgaggcttcctctcctactgaggccagacaaggcagcccagctagtagaatatatcctacatacaggcaatggcttttgggatagcccctgttctagttgattagtttttataaagtagttttgaaacattaaaccataaagtgttagaaaagggtcccgaggtatctgggtcttgcttgaccataatctacccctgaagctctgtccctagtcttttgcaatgtggagattttatgagatggtttctaatccacagtagtgactcaattgacctcggtcaccttcactgcgcgccctgtcttccttattctagattaaaccctaggacgagcatcctcaatggcttccccgggagggcgctgtgaactggaactggggaagggttaggagagtctgtggtaagaaaccgcagaagcccggggaggggaggaatgctgttatataacttgcccaaatcgctctgcagatcagctgacagggcttggtagaggttatccataaaacagaattacaaggcacttccaaacctagatctggcacggcagccagagtcacagtatacactgactccacaggcctgggagctttggggctttggttagctcaggcatgttataaatctgcacaagtggaaaaaaacaaaaaacgatgtctctctggctggccccccgaataactgtccccgagaggcctaggaaagcaaagcttcccttgcaaaaatccttaatcatctctctcaaatatgagttttccacgcagctgcagagatgaggacctgggagagaccaaggagaacagagcattcctagacatttcctggccctggggatagagtgttgaatgaatagctacaatgtgtctcccacatgcctgctaaaatgcttacagtttcccagggtttgtctgtgctctggacttgatgaacgttttgccagcgaattggataggcacaaagaaggcaaatctagcagttttcctggctcttgggtgaaagagggtatggggcagaattccagttttgaaatggtgtgtcaggtggggctggtctcagcgagttgccacttaatagggataagctttaaaagctggcctgatctcaaaagtagaagtgcaagtcaggggacgcttaggttggcaagcatctcatatgagaagaagtttatggatttgattggattaaaagaaatgtgtgagtcacccggatgctgtggccacattaaagaagaaaccagaaaggggcagagagtatcacgtgttttgtggtgggtgctaggacgaagagtgtgataccttagagcccatcagggggggagaaaagaagggtaaaagtagaaagatccaaaggtaaacaagttgtttaaagaggagttgagggaaagttagtccactctgtgggtacctgggaatcagcccagctatggaagaggagtaatgagaactaatttactctcagagacaaagtggatggtgtgtgtatgtgtgtgtgtgtgtgtgtaaacatagtggctcaaaagaagtggtaaacatttaaattttcaaataattagagtagttctggaatggaaaagaaccatttcattaaattctgaactttctgtcactagatctatttgagccaaggctggccttctgaaggttctcaacactgaaaacctcacggtcagtgagcattgagatcactcctgattctcatagtctatggtttaaatagccgtgaatgccaaggccacgcaggacacaccccttggctctgactctggccagctgtgtgaccttcagctaagacatgaactcccccccccccattttctccatctggctttaacagatgcctcagttgctcccctgcacacccggccccctgtggagtctttaagttagaccatgtgggaaaaggaaattctggcccgcttgctacctgccctaagtcttcctgcagagggaaagctttgcggaagagcaggaagttcccgaaggccaccgaactaaaaaccctcagattgcttattggcaggagagagggtagttaagaaggtacagtgtgttcccctgagacctcctcacaggatgctgatgaagtaacgggtaatctgctttctctcaagcacctgtaatgagttcagctctgcctctgcaaacaaccgaggaggaacaatggaggtcggattacctcagcacagcactcctctgtctttggcagacttcattctgtttgcttactgagctggcgatggtcttctgagttttgctcctcatcaccagagcagacactcacagagaaacttaccctgtggcacatctcttctccaagttttttctttgtttgtttttttttttctccataaatcaatttgtttaattagcttataagctgaaaaaaaatctaataacagattggcaaattagatctgtctcccactatccaagaggggaatttaagatttcatttgtcctaatggtgagagctctctgtctccggattccattgctgactgactgtgacttcttctgtgggcgcctagttccttatccctttcttctctgcctgaggcgaggctcttcattcctgcaccatcgcatgctcacttcctgacaccccttctttgacttttgtcaagctaatatcattgtctccaaattctattttcttcccccctcccaccccatatctttagtgctacacttgtccatgcacaggccagcttgtttggacatagacatagccggctgtggacaggatataaactctctcctccagtttctgaggtcagctgaactgctcataaagcaccaaggaactgaaaccctcgctccttggctggcagctctggccatacccaccccatccgcatccacagtcacattttttcccctctctgtttccgtagattggaaatgaaaacagctgttaaaaataagagtgcatgagtcatctggaatctccacgtggtaattacagtttccatctcgccctgtccagtccttcccagtgtgccgagccccgtatcacagtcccactgtggggagaacacactgtggggaaagcaaaaattttaaggaccaccttaattttcgttttctaatcctctgaggttaaacactgagtgggttgccaagccaagaaaaataacacgaaagaagatacttcaattagaaaactcgatttgtgggacgggccattttcccagttttttccattttgagcaagtctctgtgtcgatgttgatgagaggccagttcttctgtaatgtggaaggtgtcctaggattgcttcctggtactctcactatggagagtgtttagctcttgtagacgctatgcccgaaactgagttttctcttttaagcgcctgctgctttataatctagaaaacctcaaaggaggtaatccataacctgctagctgatcgtcacctgccaaggccgactgattctcttaagttacgcccagtcagccatttaacgttgactgagtaattctgatggtctaaagctatgatgccgcctctccctgcagtgaccctgctgcctacattctaatagagcccccacacacagattataaattatctgtagattatagttatctgtagattatagtttctagcaagagagctgtgtgccctattgcagtggaggcttgctgtttaccccttcattttccctttctaggtatggatttcttgacaatttgattaggtgtgtgtgtgtgtgtgtgtgtgtgtgtgtgtgtgtttactgggcatgaaacttaccaaacttaagaccaatgcatgctaagtgcacactctaccacagtgagctctactcccgaaagtgcctggttagattttttttaaattacatttatttgccgatttattggatgtatatgtgtgaatgtgtatgtgccatggcataggtcagaggacagcgtgcaggagttggttctttctttcaactgtgcaagtcccaggaattgaactcaggccgtcaaggttaccagtgaacacctttattagtgttctccactgcggctcgagacccgctctgcaaacctctgtctccaaaaataactaccttacagttcataacagtggcaaaatcacagttatgaagtagcaacaaaaataaatttaaggttgggggggtcgcacaccatgagggactgcattaaagggtcgcagcattaggaaggttgagaaacaccgctttctaaaccatcttgcgggtccaagattatttttgagttcattttccacatcgaaacctctatcattctgttatcatttccttctctgagagctagctttagctggagcgatggctcatccactgaggaggctggggcaggattgtgagttctaggccagcctgcactaggtagtcaggatgctgggctacaggaggagtccctcggcaaacctgaagctaaagaaagaaggccacaagctagttttacgaaggaagacacataatgttctgggggttttgtgttttgttttgttttggttttggttttggttttgcggggtaggaggggttcgagacaggatctctctgtgtaacagccctggctgtcctagaacttgctttgtaggtcaggctggcctggaactcacagagatctgcctgcctctacctccttagtgctgggattaaaggtgtgtgccactaccacctggcaggaagacgcacaatgtggctttcagaattccaggcaggttcctcagccccagctgccgtctccaaaccttaaatcccaccactatacagacagtcactcctttctggtgatgtgttatttctcagatgcaggaacaaactcatcaaggtgggatgcagagtcagacacctacccagttctcagcgggaccctccactcactagctgtgtgaccataggcagttaattctgctttctctaccttgtcagactcatctgtcagatgaggtgataacgatacttccctctggaatttctgtcagttctcaatgaaatgggtgatgtccttaaataaacggcatcttgctatgtgccagctattgccattttcatacgcatgaattagcagactatgtagacactagctacttttgacagagagggctgacatcagctcacaaagaaactggactttagtttgggctcagctgcatcacaacagatgactcataggagaggtttcttattggtggcatgcagtccttggatgcccagggacagagtttgaggcgaggcagggagggagaaacagggaggtgtagggggagagagggggaagtaatgacggtccccaccacttccttcagtaagtgatgggattcttggagggagagtaagcattgtggtagacacttacaaatgagctcctaccagactgcctgcttactgtcctgtgttctcgtgccttatgatagagaattggcccgtcatacttgaagaaccacagaagaatgcaaaataacatgtctttatgaagtgccccttttctttcttttagattacatgaagcagacaacatttgaagcccaagcctttttagaagctgtgcagttcttccggcaggagaagggtcactacggctcatgggaaatgaccaccggggatgaagtccaggtactatgggcctcggagctgtggatcctctctcatctgtgtgacaggggtcaaggccatataatgaaagttgcacaaatagaggatgtggtttccaaggcatttccctgagctgtctaaaagcgttgagtcaatgagctatagttcacatgaagactaccagccctggccttcaggaggacagcccacagtgcttagttaggtcgcaaagtctgtgagagcagtttgtttacaatgctaggagtgtcttttgttgttttggttatgagccaaagggctctgtgtcgagtgtgttcttacacgtccacacatgtacttgtatatttccaacccgagaacactttagaatttcaaacaattcttagtgtccgatagtttgcggaagtggatccatttaagactttgagaagttgaaatatttacaatactttaatgcaccaaagaaaacccaaagcataagaaacagaaataaactgcctggcctagcaagtagacaacatacttaatatttaacagatatttaatacagagacctgtattaaaatgttcctgtgtggtattgtgtaatgttcaaaccctaagcgtgtcttggcagtcttgcagagtggaaaggacagtgtgcacgagggaactgggaggcacagaacagctaagtgacttatgcagtcagcaacgttatttcatctcctgcctaggccacttgcttcgtattttcctccacttaaaatctttaatttatttttattttaaatgtattagtattttgcctgcatgtgtgtctgtgtgagagcgttggattccctggagcgggagttactgacaattgtgtatttgaattgtgaattgaactctggtccccttgaggatcagccagtgctcctaaccactgagccatctctccagtccctcacttaaagtcttaatcgtatgtcagttcacatttctttccactgaaaacaagaatttagtagaacttttgtggggttgagtgtttcagtgtgtgtgtgtgtgtgtgtgtgtatgctttctgtctactttatcctttgggctaacatgcactaagtgctacagaaagtgcaaaagagctaagtgactccttttatattgctctcttagtagtaatgactcacacgagtgtggcaagctttcgtggtgatggttgttttaggcagaggtccaggcagagcagtgtctcagaataaatttcctggcaggctgtttaggtgaaaatgtttgtatgcttggtaaaagcatcaacgcattttctacttgtcaatatgagctacgagcactatcagatgaactcatgagaaaaaaaaatctgcaaaaatgtcaagtagctgcaggtatgaggtatttatttgcctttaaattaaccaggcgggtgggaacatctcgtccttcccaggctgcttggttctaagaccagaaaacttcccttggtcttgtctattccttctagactggtctttattcaagatatcttgaatggggccctaggtagacacactcacctacagtgtttcagtaacacagggccccggggccaagggtccagtcagacacagggcctgcctttgggaggggcatccttcctcagtctttttttttttttttttttttttgggtttttgagacaggttttctctgtgtagccctggctgtcctggaactcactctgtagaccaggctggccccaaactcagaaatccacctgcctctgcctcccaagtgctgggattaaaggcgtgcaccaccaccacccggcttaaaatgtgtagcccaggctggcctcgaactcgtgatcctcctgcttctgcctccttcagcaaatcctaccggcgtgtgccaccactacaggcccttcctcagtcttaccccttcttacagcttctagtctgagaagaagcacagtgctctgcccttagggcatagtgtgacttcagtgagtgtgctctgttggtttgggttttgttgttgttttgagggacagggtctcagcgtgtagctcaggctagccctaaggtattggcttgtagctcaggctagcttcaagctcttaccttacctccctcggtttccttaatcatatatgagatatgcagcaccaaaccctgcttggtttgttcattttgatcaatctgatgacatctttggtttcttatgtgtgtgaggaaatccttcactccacagcccagcagttaaattttctcaccatctcttctcacctttttaaaatgcaaaattataaaaatgatgtttgagggtctttatggtataactcagtaaattctgtttgatggggagttaatagaaccttcttatttaattaattaattaattaattaatttgattagctactttccctcaaaaagcccacaggcttctctcttgcttatggagagctggccatggtgggtcgcccagagtgggcaggcaagggacgaagcggtgtcaggatgggaggaagctgaattaagaggatgaggaaggtggtgttagcatgagatggcatggtaccccaggctctgccagcctcgggcctcttcccaacccctacccacccccctcggagcctctcttccccctctctctttctttcccagacatattttcttttcaagttcccaagctgtaaaatagaagcaaatttcttggaacgtcatgtgggaaagagcagaggcaaactgcaagcccacccagatgggatgttggttttctttggcctttgtgtgtaacatttgggtcttctcacatttattcacactcatgctcaaaatcaatccagtctctgcagaaggacagatgagcagaactgtgactcttgacttcaaggcttttcaaccaggacagcatttcccatttttctttgctttagtctccatccgtcttagctctctctctcctcacaccatacttgataggtcttgggcataggttccagcaaaaactcactcacctgggcaggagtgacctggggacgattaattactcactgaatcaaatggctgaacctgctgagttccaatatgtttgcctacatcaagtttcttatgagatcctgagaaaacggtgattttttttccattttttattaggtatttagctcatttacatttccaatgctataccaaaagtcccccatacccacccactccccctttttggccctggcgttcccctgtactggggcatcatcgcttaatggtccacagagagtgactcagaaaggaaacacaagtccatctgcgagttttcaaggcctatgaacatcttgcctctgttattttcatcacttgaggtagatccacattgtagcagatgggagcccttcagctgtactgagcctagcagctcctttcccaggagcccagggaaccagggacccagcccgcttgtcctttccagcctcagagcattccagttcagtccagctagagcgtcacaccctgccataatggagccctggagaagggccaaggtcagtgagcttgtgagggtttccacggatgtggctgaccagtgagctcagagagagcttccttgtagcccgaagtataatttgaacttttatgagaaggaggtcagatgttttggataaatattacttcagcttcacagacccgatgtctctagtgacggtctgctctgctgcctgctgacattctcgacggtgcccctgccttgttgcagacctcagtctgcagcctgctgttgctgctgagctgtgatcctcagaagaccccaggttaagtgaatcagagcagcagagctaccccaagtcacgcctgagagcagagaaggaagggtggggactacgctgaacctgtagatagactactgctcagatgcaagggaacatgagcattgatcagcacaaagttttagaatggatttgggaacactcctacagtgtactctgaaaactttccatgtccctttaagtctgcttagcccacaagtgtcactttgttttttgttttttgttttttgttttttgttttttgttttttgttttttgtttttttatttaaagattctatttatttatttattcattttacatatgacaagcacactgtagctgtcttcatagacaccagaaggtggcatcagacccgattacagatggttgtgagccaccatgtggttgctgggatttgaactcaggacctgtggaagagcagtcagtgctcttaaccactgagccatctctctagcccatcactttgtttcatagtatttggtgctaatttatctttaaattgtttgcctaagcagggtccaggtttcttaatgatacttttcatagataggatattccagccagtacatgggtcattaacaaccttctagctgccttcttcagtgcatggctgcaggagaaggctgctgtaaaacacaatgttgtcttcattctatccgcggggagtgtttggagtaaaggttggcacttcaccgttggcatgctactgaagacattttcaccagccgactttggctttcagatgcagccgggcaatgccagaattatctatctgatgatgtgtagctgagaaaaggggccacttgctctcttaagggactctgtccttagggcacagctggaacattggcataccagtagccagcttttggggctggtgcacggggggggggggggtgtcaggttctaacagatctctgggcttaatgacattaaatacagaaaacagagtgagagagtggctttttaaaaacagtgccataggcattagcccaggtgactgtgtgtccctggaaggaaacccttctcctgggagccaagagatagtcctcttaaagtataaggcaaaaatagctctcccacagcaatccagcctaggagatgttgattaatgacatatgtccctcccctttaaaacacagtgaaacaatgaaatcttctgttgcttaacaatgtaagttcgtaagtgttaaaaacacgtaacacaattctgcagctttgtcttggttgtgttttgtttttgagacaggatctcaccatgtagctcacactggcccagggatgctcgatccccctgattcaacctcttaagtatttgggattataggcaggtacaatctcatccagaaaaattgtgcatttttataaaacttgtttaaagaataatatttcaaagtaggcagtcatattctctctctctccctctttctctctccctccctccctccttccctgtctccctccctccctccctccctctctcctggaagcatcaacaataccttcagttttctgtgcctggtttgttttggaatctctgtttcctgcccttgccagcatctccttggccctttggtaccttctcttccttctttacagggaccctgttagacttgatatctttggaggaggtttagctaaccaccctgaactttgtcctttaccttggttttacctccagcccttttcttaggcacagaagcaatgatagaagacacagtgctgggtggggcagtacactaagggcttggagtggtctcttatctctttactttgttgctccatcctttttgtaaccatcagaggatgaagggaatgctcgggaatacttggagtaaggagattgaggcatgcagaggcttgagaaagaatggcagtcttaggaccacagaccaggctcaagccatcatgtccaaacttgatgctcctgtttaaggataccttatctgccactgaaagccaccctctcattctactaaacacaaggaatcttgttagcgtgaacacgaagagcttggatttaggaaatagttcctgccattgagataacagtagtagaacatgtcggcagacacatctgttccccgtgaatatgaagaatatttacctttgagtttgaggaaagattttatacggttatcatatgcacagccgtgagttccatctccgacatcagcatcaaggtctctcctcctcatccccccaacctctgcctacttcagagcccatggagcccaggacacggacgctgtcgtgagacctcgagccggccatcctccgctgatgctctgcccgcttctcctttactctgcaggtcctgagtaagctggtgatggaggagctcctgccgaccctccagactgacctgctgcctaaactgaaggggaagaagaatgacagaaagagggcctggtttggagtaagttacaatgttactttgtaactgtgtatcaaaatgaatgttctcatctctttactttttcctttttctttatttcttttcttggtggtggtgatggtggtgggggaatttggtgttgttttaaaataattcctttccttcctaggtaaaagagtgtcagctttgaacctgctcaatctcactggcataataactaatctaaacagagtcgttcttacaatttgagcatgtgctcagctctgttttatgtgagagtctgtggtaggctggcctccctcccttctggaactccttcagtcatagatgatgcactgttctgtgtttcagctcctggaggaagcctacaatctggttcagcaccaagtttcagaaggattaaatgccttgaaggaggagtgcagagctctgacaaaggacctggaagggaccatccgctcagacatggatcagattgtgacctcaaagaactttctaactgggaagatccgaggttggtggaatgaccccttactgctcccaacaaataagctgtccactgagagattcatacatagagaggatgtgctgagcctctgtatccatgggtctcatatctgtggattccaccaaccacagatcaaaatgcacaaggaagggaaaaaaaaaaaaaaacgtttgcaatgatcaggttcaggcttctctgttattccctaaacaatacagtatggctattatgtcccatctatattgtattcagtataataagtaaactatttaatgtcttaagtaataggaggtatatagttgggtgtgcactggttccatgaaaaagcagtaattttagtgtctcaggattttggcctcctctgggatggggttgagaggactctcagaaccaattgccctcagatagtatatctagtttccgaagagaattaagctgagggaattgaggggagaaagtagtagtggttgtagaaggagaatgctgtagcattgttaaggccttcgttttaccctggatgtgttgtagactcaaggtagcaggaaccttgcttcctgcattgtggtgtgcctgtgtatcgtgttgaagaatgaggttttctttgatagaaagcctgcagttttggcttagggtcagtaaatctgaataagttaatcagtcataagttagtgttcctattaaccagtcaggtgtatttgaggccgtcactggcttctatttgccttagtctccaaatctgaagttggtaaactacagtcctcaagcccgatctggccccgctagattttgtagatgatgtcgttttgaacacagccatgctcattcatgagttcatagtctaagctgctctgtgctcctgcgttcagaactgagctgttggaaacttaaggacgacatagccacagatatttactgtctggcccttgattgaacatggctgtcccacccccacacagcagccttagatggcctggaggggtctttgggatactttctgtgactccctgttctttctcagtcctgtacccaatgcgtggagcacttctagtgttgctgcggaggaagggcatgtatgctcttcagtgattatttctcagaagtatttctggatagctcaggtgaatactcacacattgaacgtttgctaagtgccctctgagcaagtggtggagattgggaccctgtgctcctgaggctgcctgtctaacggtggctgtctgcctggcagattatcatctgcaattcacaccttcttcatactacagcccaacatgcttcagagctcttaggatgggtcccactgagaggagattagaagagacatagctatgcacatgtgtgctaagagacatgcgcatccgtggtgacctcgggcctgcctgtttctgcaatgcttccaaagtcagatacagatcagccttagtgtgatttctgtttgatatggtccagcctcacaacccatctagggtgagtgtcgtaattctgtgtctatctaagactgccaacgttctgtcctctcagacccatgtgggcctaacgacccaggctgaaagcagaccagtttcttttacctaatgttccatgtacctgcctgttaatttgctttttaaaagatctgcccattacttcactcaagagtgaggccattaatcatcagttctgttccacacttatctgctaggaagaacttattttgctcatgctcagtgtaaggactgaaaggtttcagatcaacacacttttatacacagaagacatgacacattctgtagataccaaaacagaaggaaaatatgatgaatgttctcagagaaaccagaacaaagaggtcaggttcagaaaactgccggggcggggctcgtaaggagcatagttagaattaggtggttagaaagcatgagaaagcctacagtcctgggttcttgtgtgtcacagccatccttggaaaatggtggacttgtttcttcttcatcataacccctggaataattacttctctgatctccattttacagacaacaaaactgaggccgtggttaaggggcatccctgacaccccgaggctagcatgcagcaggctctgacccagccccaccagcttcagccttctaggcttctcaaaagctgccagctgtcaaggaggctctttaattagtcacacctccctagtcatcatagcctcatcggtgtatccttgaaatagggcacagtgcataaatgtgggcctccaatcttactcagcctggaaggaaacacctgtgggacacagttcaggaactctggtggtgggattcattgggctgtcccaaaaatgtgacattggaactggatcctgaaggcacaatgaaaaggacgtttgcaagaggtcatggaggaaggcaggcccaggtgaaaggacactggatagatgatggggctgaggggggagcagagagctccaccatgagtagcaggcagggaaagctgaggagaggagcatgggccatctctccccatcttgcaaatgtccagcactgccagatcattgctgtgcattgccagtgcccggaattactgaaactccagttagatgcttttcaaacagttcctctcacaaagttaatgaactgacagcttattttcttggcaagcagttttacaatttggtttcagacaaatcctctttttaaaaatttacaaagcttaaaatgtttccttttttgagtctgtcatcaaaggggtcttgtatttattctttattttcatacatgtacacaatatatcttgattatatccactctcaactccccctttcactcacccacttcatccccctcctaccttcatcttcatcccctccctccctgcccccccatttccctccttctcagtaaaccactgggtctaattagtgctacctgctagaatgtagagtgatcttatgtgggtcttttatttaaaaaccaccatttatttgtgaatatgcatgcgtgtgtgtttgcacacgagcgtacacatttcacataggtggaggtcaaagagcatcttttaggagtcaggagtcagctcactctttctggcatgtgagtgcaagggttcaaactcccatcatcctcttggtttggcaggaaatgccttcactcactgaactatcgtgctggctcctgtacaggccaccatagcgctgtgagttcctgattaccgtgccaaatccagaaaaagttaagcccagttctggcccacactcctgcatttgcacattagccttgaccttggtacagttatctaatgtggctagtttctctttttcctgggcagagcagggtgtgacacactgaacttcagcgaatgggtcttcccgcttggtgcagtatgctctgctctgccaccatatcacagctagactgaaagtgagtggcaagctgaacggagctcggtgcctgagattgcatttgagtctttgaagggtctctggtggtgggtgggtggagttacactgacttagtgcttagagaaatgaattataactgacacatctgtttcagaatacaaagtgcacatctttgatgatggtagtgaaggctaggttggtccggccattgtacactcgtagagatcaaacagtgaactgcattcttcccagggcaggataaagcttggggaagaaacttctggaaatgctttaggtctcaaagcatcagctggttgcagcctggtaaatgctggcaaaggatctattatgctgttctgcccataggaactgcccaagggaccatttagctaccatgtggtctctgaatccaaatttgccctaagccatgcctttctttgtctgtttccttccttagcaatggtggctcagccagccgagcagtgctgtggggagagcgtgcagcccttcctggcgtccattctggaggagctaatggggccagtgagctctggcttcagtgaagtccgtgcacttttcgaaaaagaagtagatgaactcagtcagagcttccatgctacccaggacagtgcccagctgaaggaggtaggagagagagtgcacaccgaggggcagggagcctggggctgctgggctgcctttcttgctctcctcttgtttctccttgacccttcccagcctctcctcttccctccctttcccgtgtcccatcctctctttcagtcccctctagcctctccttctttttctttccctctttccttccccttccatccatttatctggcatttctgccacctattcaacaaactcattgatccatccattcataacttaaaaccacctaattttccttattaatggttcctaagtcgcaaatatgtttgtgcaaggcaaacaaccaactcaaatatataattctatgtccataaagaggcaaaattagaaaccagccttgacaccaactgctcctcgtccctctggcttcatacccaagcccctggattgactgctatagtctggtgtatgtttacctgcatactctattggttcatgtatcagcatatctctttattttaagtcctgtttgctgctttgtttccacaggtataggctcctaatatagatgcatgcttgtagggcagcagtggtccctcagtgcactgaatcaggaagtgggggagggtgtaatctgcttagctatggagaccaggggagttgatataccctcatgttcaagccttgctgacacacacacacacacacacacacacacacacacacacacacacacgccgctggcctgccttacacttaacagatcattaaggatgggcttgttggggtggctcttcctcccttcctgataatcacttcaaagcatttgtccttttaattggcacattgtaattgtgccacacttatgggcgacagtgtggcaatgttacccagagctttgaaggcagaagcctggtcccacagccccaataaacttttctcagccacatgccaatcaatcacaagatgagtggcggtgaccagcagaggaaagaggtctatttaatgtgcccacctcgggaagaggaaaagagagtccagaaagacccaagtctggctttgaagtgctgaccaaccagagctttaggcttaaatagagggagaactggggcgggaccccggtcagctctcccgtcccagcttgacccatctggttcctatgggctgagctcttctgctctggtgtagcctggcctgcaatggcgactgcccccatacatgtggatatatcctgggaggttctgctcctcctaggacaacaaagtgactgcagagttgggacaatgacttacctctgtgccttcagccacagtaaaggagacagacagatactaaaggaaggtagacatgccagcttccatcctactttaggtacccgtggacctacctgaggggtcaatgccatttcagcaaaagcagcttctacacgcctgtttcagcagtttatacatgcagatggtgcagaatgatcgcaccaggaattaccgattctattcccttaaacatttttcatttctgtgtgttatgagctctttgggctcattataaaacatgtgatagattgcggtaagccatagtttccctccggtgctgggctctcatttcttaatgtgcatattcacatgtatgattgtacaaaaccaagatcatttaataaatgttttgatgcttcttattacatctctgtgttcatgtgtgtgtgcacatgtttatatgggggtgtgtgcatgtgtggtttgtgtatgtgtggggttggggcatgtatgtgtatgtatgtgtggggtttagggcatgtatatttatgtgtatgcatatgcagacacttgtgtatgtgtgtatgtatgtatgtatgtatgtatacacatgtgtcttttaccttgcctttcttcctctttgttttctggcaacactctcttctccgcaaataaccattatcaccaatttggcttgtgctatgctgcgctttccctctcttaggagatatataaaacacacacatttcacagctgttgtcttccattgcttgcttttagaaaaatatagttattttatataccatgatgtttatcagatttcttcctcacaatgatttcatgaaactgtctccaaggtaactgtcctagttctaaatcactttgtgtaatgacagcataatatttcatgtttagaaatgctgtgatttattcagccatcctaacattgctgacagcatgagcagagtcataataaataacctcgtacctacattttactgtattattgatacatgtgtatgtgtatacacgcacagtccttacatcttgatgcttttatttcagtgggatagagtcctaggttaaaagatatatttctatgttaacatatgtttcagttaaagtttaaaggaattttaaattttgcattatactgatttgtttgtggcagggagccttctccccatgttaccctctgtgatggtggctgtcacttatttaaacctcaacaatctgatgaaggtgaagcaagctttcctctcttgcctattcaatgaattatttctaagtaatacattcctggctcagcagttaagtctacctgctgctcttccagaggacacaaatttgattcccagctccaggtcaggggcctcaggaccaactgtaacaaccccctccccctcaggggatccaacgccctcttctggccctcatgtgtactacattcacatgctgtactcttaacacacagagatactcagtattaaaaagaaacctttgaaaaaggaagtgatactatgtacaattgtaggatgaaagcaactgcaacaatgtttcctttctccctgtttagtctttagttcctcttcagcagacctctccattgcttacttcttaaagtgaatactttccccttttcaagcacaatgggatgggcccttggaaaattcatgccagatacatgtcagacagattcatgtcagatacagatatgtcctgtgtcactcacacctacctgccttgtgcacagcttctcttgagagctttcattatcagcaatttttttcctgtctttacccattctcctgtctaagcttacagtgtgcgaaaccatttgcaactaagcttagaatatgaaacaagtttctaccccttggagaaccttttgcaggctcacggactgagcagcagttctcacagcctgtctagctggtccttgacctcaggaagcagggacttacaggctactgaggacttaaggagctgggagccccggcttgagctgccccagagaaccacagaaagaagacattgaagatgcctcggataaagtggtccaagcagtaattaatactcatagcgtacacttgattgtttcacaacactagtatgtcatatggagaaaagatccctaagtctaaggcagtttgcttttcttctctaccaaaatgcagggcctacagcagctaatgaagcttcctctggattctgtgaagatggagccttgctatactaaagtcaccctgcttccagagcgcctgctggacctccagagccgcttcaggttccctcacgttgacctggtggtccagaggactcagaactacatgcaagaggtgggagcagagtccagggagggtgaggctgaggaagaggctgaggcaagaaaggagggaagagagagggcgagaaggataaatgcatgctggtgggtgtgtccatggtgctcttcagctcaggaaagtgaggcgggagtcaggttgacagaggacacacactgttcttcaagctggctttatctcgccttagaaaataagagtctgggaagataaggtagcattaactagtaattatctgatggttgagtcagggctgcaaactttggctacagatgagaaacacatggggaaaatttaaaaactactaatgtgctaccccactccaggtgagtgagtgtgtgtgtgtgtgtgtgtgtgtgtgtgtgtgtgtgtgtgtgtgtgatatctgaaattctcagcatactctagccctattccggtgtttctaatctgcaaccaggatctagagacaatggttgaattctccaccttgttataagagaacccatgacagtttcatattggatttttatttttttaaatttattctattatgtgtacatctgtgcacacctgcttgtctgtgtatgtaccatgcacatgcaggttcctgaggaggccagaagagggtgtcagacacctatgactggagctatcggtggttgtgagcttccctgtggtgctgggaagagaactggagtcttccggaagagcagagtgttaactgctgaaccatgtctctagctctgatattcaaatttcttgagtctaccccatagattctctcccccctcatgatgaggtcctcctccttcagagacaaaactaagtaagtactatggactccttcatattatagtgttccctaaatgaaagaaacatctaattccacatgtttagcttgctgcaactaaaccctacacggaatcccacttcagggagccagggttatgacgaattctacctaagaccaagtcttaggtaaatgtagtggtgttgaaagtgcctggataaaatattttacctaaaaattacaggcaggattagttttgtgtgttatcatctaatctcagttagtgatgattggagttgctggatgtggtggtgcccatctgtaattccaggatcggggaggtagaggcaggaggatctgatcaggagtttaaggtctttgtcttcattacaagttcaaggctatcctaggctgaatgaaacctctctaaaaagtataaaggataaatggcagaattaggtaacaatataacaatataaccggctatagactaagacatctgagctgcatcagtttcctgagcaataaatttctgtccccagtgtgatagccactactgccatggagtcctgaccctgcctcttctctccagctctatcagtgccctttcttattgctatgacagagtatcggacaggagccacttaagggagaaaggcttccttttggcttatgggttgagagggaacagcccaacaaggcaagaggtcatggtggaggtcatagaagtagtagcatgtggctggggccgctcctaatgctgatgccaggaagcagagagggctcaagctagacgtggaatgaagctaggtatattccttaagccttccacctcctccagcaaggaaccgcagcctaaagattcaataacctcctggaacagtgcagcccaataaagaccagtgttcaaaaacaggaataagcctacaggggtcatttcacattcaatctggaacactagcctggcagaggaaggagggggctgtcattctaggtgtggagttgttatctgagtctgcattgccagggaatggaggagaatgtccactggagactgtggctctgagtccctctgtattgggaatgaacggatgccattatgcaggcaggcagacagacagacagacagatgtatatgtatagagagggatgtttcccaccctccccctatttcacagtggctactaggtatcttgttttacactccagggagtagggggagtgttgggtcactccacagttgttcccggagagctctgtccatcacctcctttcggagctcaggtgggcgggcgggaccccatgttcccagcctctgactgttgtcattttctatcttgatggatagctcatggagaatgctgtgttcacgtttgagcagttgctctccccatatctccaaggagaggcttccagaataccagtggccatcgagaaggttaagctccgtgtcttaaaggtaagagtttggtcttcatctgtctgggagcatctgacaagattgtgacccctgttcctttactcagtgggaaaaaccctgacctcccttgtatcccattagacccgtttttttcccaagcagataaccattgttaacacagcagtttccccagcatgactctcatgcctcttctgccatctagtggctttttctggaactacatgtcctcagcatgcgctcccagttagaactgacccgtgagtgttgactgactgcttcaagcactgtcactggtattgcataaaatatgcaatataaccacaggccagctgcatctgagctctccaagtacagtaaaatccactaaattaaccaacattttaaaataaaaaacaaatcttagagccagaggaactatcccaagggaaaacatgagataggttttaatgagctctatgtataagtgcttaataaaaagctgttgcgataacaggagctcgcacacatttggtacttacttaaagcctgtttaaaattcatgctcctaagatttgttgttcctaagttttcattccaagggtttatatgtttcgtttctgttatgtatatgcattagtgtgtgtctgtgggactgtatgccacctgtgtgtgggttcccatggagaccagaggaggatgtcaggtcctttggagccaaaggtacaggctagctggagtcatccatcataggtgctggggacagaattcaggtcctctgaaagagcagagccatctcctcaggcctctttaaagtcttttaaggaaaagaccccaaagctaccattccctttgactttcactgagcttagatgatggttagactccgctccacagcagatgaggaagccaaatttctagaagcaggcctccctccctcaaagtcaggagtacatgagctccgagctgatatttacacatggcccactaacttctgcttcctcctgcttcccccaagcaatgctttagaacagaactttaaagtcccactaggtctgagggatgtctcagagtttcagacctcatcctgatgccacagagcaggagaaaactctggcaaccaaactgtcgagaagagaagcgatgttgctcctagcaacacaaataaaaacacactcacaattgacatgaggggaaagggcgaacctcagtcatcacttgagcagacaggagaggaagggagtagaaaggtgtaccaatcttcggtttggggttcaaaggaacttagaatacctcaagttcaacttcctagccagcgttaaaaacgttcctgcccagtgaacagggcccgccagagttctgagtgaggaacttccagtgctgtttggggttgcagggatacacaaccttgggtgtctcacatccactttagatttggggtttcctggaacccttgcaaacatcctaaatgttgagtgatctgtagaacagacctgtgtgacaggggtctagccatcgacagtttcacgttcctgaactcaaacatcctgaaactattggctatatttgactttagcctcccttttatttagagaaatgccattgtaattgcaaaaaaagtccaagtcaagtatttgtagaagagcaatccgtttggaagaagacaaaaatcctgaccactagtccactgggtatctttaaaagctgtagttacatgattgaatagaaggtggtaacttacagaaatctataggtaccacgtactacagacgtacatcatatggactaataagaggagagatcttcttccagatttggcttctcagtggttttagatttttgtgtgacttcccacatggccatagattttctgatgattagcaaacatttatttttttgtctttattattatctccttttcaaatgagattttttactgtagttaaactatttgctactccaataaatagataatagacagacggatggatggacagacagacagacaaaataaaaagtgtggcagtgtctcaaatactcagacacctccacaatcacaacaaataccacctccaaagacagccagttgaacttttcacaagtgtgtgtgcaagcccataccttctgatgttagagtcaggctcttaaaactggtaattgttctcccacgccttccttcatagccttctccacctggttgcctttggtagcttgagtagagatgtcattttgctcctatttatgatctgcagtgtgagtgctctcctttcctcttttggcttgaccattgtgtttacacgcctacagtagttctccattgcacccatgcagaaggccctggcgttcacatgcaaaccagtaaggaaatgggcagctccaagagcgtgctcttattgcctcttaagttcaaaattgttcttttgtgtgcctgtcctggaaaatactacactgaaccagcgggggctgagtgaactctcttaaaagtgtcaggaggtagatgttttagtcttcattttctgttgcaaccacccagtgtggctactatgtacctccagtttgggatgttcagggtggaacagagaaaccctctcttgttcaagagacttctttggttaaccgttccccgctgtattgatggagctttgagccatgacctctctccctctgtagatatcattacaaggctcgaacagtgcttgcaggacagcagataattgatatctgtggctcccctgtgtctacccagccaggaataatgaagcacaaactcactctctagtttgaggcccatctttttgaacaagatctcacttcttcgttttcatcttgcctgtttgtaaaagaggtgcatggactaggtgatggtgtcacagtctatactcagtttgtgtagacgctccagaaatagatctctgagacctgagagtccttagaaattagtggggctgaggagaggaagtgacatgggtggctgtgttgttttgttgttttagatcacagtttgaaacgctgttccttagcacgtgtctctgtgtccacagcaatatgattacgacagcagcaccatccggaagaagatcttccaggaggcattgattcaaatcacactgcccactgtgcagaaggcgctggcatccacatgcaaaccagtaaggcgactcccatgagcgtgctcttgttgacttttgagttcagatgtttgacttcacacttctgcactgacagagtgcagaactagagtacagcagagggctggggcattctttatggagaaggacaggtagcggatgttttaggttttatggacttgtttctgtcacagccactcagtgctgttgtttaatatacaacagcagccagagatgatgcataaatatataatcaaagtctgtattaaagtaaacatgtgcacaaaacacacacacacacacacacagagagagagagagagagagagagagagagatcctaggatttgtgacttctggactacaggaaatcaaagttggactggagccaacttctgagggctgtctgccatggactgccagaggaaacgagacatcccccgttttattgccagtccttactgagagagcgtgtaccctgaaagttgaccactatacccagaaaggatctaatatgtgatggcagagggctgtttgtactcctacgttctgtaactttagtttactggaatctctgacataagctggtgcgagcaaggggttgcaggacagccatgattatggtgtgggtagagcaacgggcaggaagcatctgcaggctgcttcaagttttctgtttaagtcctggctcccctctgctctgctctgggcccctgagcaagcatgcccctgtgatcctgttttgatcaactttcatcatttatgacattcatctactaatgtgtgtatcttactttttatttttctgttaccaccaaacctcccccctgtctcttctccccaacccccacacttttgtcagtatcttgctgcgtagcccaggttgggtaataaacttttgatccatctggcctgctaaaactgcacctccacacagatttgcattatctgtctcaagaatgaaacatgagctggagagatggctcagcggttaagagcactgatttctcttctgaaggtcctgagttcaaatcccagcaaccacatggtggctcacaaccatctgtaacgagatctgatgccctcttctggggtgtctgaagacagctacagtgtacttacatataataaataaataaatctttttttttaaaaaatgaaacattagaaaaaagcatttgccatctgattaagttcctatcatacacaggcatagcattaaacatttcttatggatcatcaaaatgaatttcacagtggcccttgaaggaagagagagactattcacagcctcgtggtgctaacgagggaagtaagtggttgagttgtagcaggcccaacatcacaaggccggttaccaccagctgaatccagtttatttacctaggacacagctggcactcagcaaatggcaacacctgcctacagctgttactcttgctgtttctgtgttccaaaaatatgacttaggaacttggccatttgcaaggcctgttccccctcggagtcaataagaaagagcatcatagaattttcaaatggctttttgacagtttggagactctccaagcatggaacattaaaatcctttgtgtgggttattgtactgtggaattttcactggtttgttttcatattctataaatgctgtttttcttcagatagtcattggcacatccagtcttgctttaattcctggagttgttttgttttgttttgttttgttttttggtggaaaggttctgacaaaaccaaaggagaaaggaactggcctgtgtgcctgactcttggccatgtgtgaaggatgactccagggcctggagatgactgattctcctcaggaggcgtttgtgtttccctcccaagggaagtacagacgcctccgtgctcccttctccgtgtgaggagaggaaggagggctctggctccccttgtttctatgtcctctgttcctaacatcaaaagagtgaattgtgcccagtctatataggtcattgcagatgttttgttttgtcctgtgaacatgcaattggcacgtgtgtaggtgtgtgtgttttcagatctgtttgtctgtctgtgtgtgtaggccaggggttgacacagagtgtccttctccatcgtactgaacatggagcttgtcaatcgacttgtccacctggccagcttggcttagggatcctgcctctgtgtcctaagcactgggcttacaaggtgtctaaccgtccatcccatccccagctcacccacctctgtgtggctgccttacccagtgaacctttggactcagttgtggctcctgctatctttcattgaaagaggttgcttttaaaagagcctgtgaccctgacttttccatgataatggacattatgtgtcagtgtccagagccttatgaactctagttttatatgcagatatattaagggattatctgctagttttatatgcaggtatattaagggattatctgcttcattttcccaaagtgagtttttttttttcttagttcttttagtagcaacttcctagggctgtgacatttgactctaacctaactgtgtagcagaattgcctgtggtgcattttcttaaccaccgtccaggtcttcagcatcagggttccatcttagctgattgagaaacttaagcagatgacccagttcagctgtctcaacatgcaggatgtaccttgtgagggagcaatacgtgtgttcctttgttctctccccacaggattactgaaatagttgaaaacatgttttctattcattcagcaaacgtacttcataaatgtatcaaacgtgatccaggttcccagctagtggcagatgccgggcacacaggatgccatgtgggcaatgcaacagtggccgcccttctagggaaggtattaactttccaactgagctctagcagttcagggagacttcccagggtcaggccttcacttcgtaccagtggatgtaatggcaggggagcaaggaccagcatgggaagatgaaggggtgttgaggcttgatctagcacccctcatataacagaagtaaagactcagagtggtgccttggcttgcccaggctcctatgagcagtcagtgccccttccaaagcgtcatggttcttgtgtgttaaaccttctagagctcactgaagctcctgtctctttagtctttcgtctttcttctcaggtggacataaagagacccatgttatccactgggggattccataaaacccagggccacagcacccacatgtcttagtactgaaagctgtctaaatgtgatagtgtcatagaccttatttaatccctgtctgggtttctaccctacctttgattattcagttcctgtgtaaaagacacaatgtttattatttacagtaagtcttaaacagcacaagagctgagcagatacctaccctctatgctattagaatctgcttccctattgataaccctgtgttattacttatcatgtttcatctgggctgctcttaactctaactgggcagccttcagggccacgttttcacaaacccacctaacccatggtgacctcctcctccttgtggttctcttccaacccgaagcccaggaatcctaaaccccacctatgcatcttctgctcccctattggctgtcggcatcgttatttaccaatcagaaataacttgggggcaagatcacatagtgtagtcacttgtctctggggcacccagctcttgaggaaccaatattagcatcagaatacaagcagtatcaggccaacccactacttagtagtttcctgctacccgcctcaaaaactggccattaggcccaaaagcatcaagtttcactgttaagttcctgggtctctaaaagctgtatacagggagcatcccctgccaagcatttattcatgtgcctgaataaccaaattcatcctggcatataataagtaacatttttatccatgtctggtcttcatgctgataagaaagcattagaaggctttaggaggttgggcaggtcaagggactttgtatcatgtctgagtagtcttggaattggaggctgtcagtgccaattgaagaggaagactccctgattctccaactggaaaaggactcctgtgctgctaatgtcaaaaatatatccatacctgatccagaaatctcagttctaggtatctacctaagataaacgagttcttgagtcagtccatacagaacagaatgttcattagtcaaaaagtcaatgttttagtcactgtcctattgctgtgaagagacaacaactcttataagagaaagtatttaattgggggctagcttatagtttcagagggttggtccattttcattatggcagcatgcaggcaggcatggcactgaggaagtatttgagagctgcatcctgacctttattcagatagagagacacagagagagagagagagagagagagagagagagagagagagagagagaaagacatacatacatgcatacatacataaagacagagagagagggagagggagggggaggggggannnnnnnnnnnnnnnnnnnngggagagggagagggagagagagaggtagaaagactgggcctggtgtgggcttttgaaacttcagcctactctcagtggcacatttcctccaataaggccacacctactcctacctcctaatccttatcaaatggtaccactccctggttcttaggcacttaaatatatgaccctatgggggctattcttatgcaaatcaccttagtcaatatcaaatgaatatggatgaacaattctaactcattcatatagtgaatgttgtttatcaataaggaggaatgagctgctgacctgtgtcatagtgtggaaaaatcgaaagagcaaacacaaaataacatgtggttttatttacatgcaaaacccaacctactgtgacagatgtccatcaggccttatctcttggaggggtgtggtctgggtgaggactaggttatggtcacaggaacaaatttatatttatattttatatttatatttaacatcaagatgtacttttacaatctgcatttcaccacatttaactttaactttggcaaagcactctttgtatcagataaaaaatgaagaaggaaggctggagaggtggctcagcagttaagggcactggctgccctttcagaggtcctgagttcaattcccagcaaccacacagtggctcacaaccatccataagggaatctgatgtcctcttctgttatgaaggcacacatgcaaataggacattcatatgcataaataataaatctttttttaaaatgcaggaaacattggttagtattgagaaaaagaggacacggcacccctcacagaccttgagatgtctagaaaaaccatctctgcacaggatgagctcccagaagacacagaggaaatggccagtggctgcctgcctccttatcctaggcagtactaggaggttagcacataggcttgaggcaaagggaacacagggacacattgttggctgcattgttacctaagcatctttaacctgtaggaccagctgccatcctcccacgctccccaaggaggaggcaataaatgggagtcaccctttccccatctcttttgaaaataggcatcttacctttcccccttgcttttattattatacattaattacaaaaaccaatgggtctctttctattttcatgttcgaacacagtaccctctgatcgcttgccctcatgactcatccctcttgtccctcttgccaatctgctttccaaattgtcttccttcagcgttcctgtcttcttaaatgttttctaaatctagattctgcatgtgagaggaagtgggtgacctgcgtctttctgggttattcacttacactgacgatctccatctgatccactttcctgaagatgacataatttcacttactgtgtatacaccacgatctccttacccattcgtctgtggttgggcatgagggttgcttccatatcttggctagtatgaagtttcctcaggcacacatgtaagcgtggtagctggatcatatgtagttctaattttagttttctgagaaaggtccatagtaattttgtttgtttgtttgttttttgttttttgagacagggtttctctgtgcagccctcgctgtcctggaactcactttgtagaccaggctggcctcgaactcagaaatctgtctgcctctgtctcccaagtgctgggattaaaggcgtgcaccaccacgcctggctcatagtaatttttataatgcctcaactaactcccatccctaccagccgtgtacaaaggctccctcttctctgcgtcctccccagcatttactgtcttcttgcctttaaaatggtgtgagatgaaatttcaacgtggctttgagttgcatttctccgacattatggcttttcctcttcatccttttctctctcgctctccaggagcttcagaaatatgagcagttcatctttgcagatcataccaacatgatccacgttgagaacgtctatgaagagattttgtatgagatcctcctcgatgagaccctgaaaggtgaggggggagcactttgtaatggggagcactctagaaatcggactcgggaaggctgtagggtcagaacgagggagagttgaaactgatattggtctacaggggagacaacaaggagagggcagaaatgaaggaaggaaggaccgagctcaactcatttacaaggtgactgcacctctttcaatgcaagcatgatttctgtaggagaagcatataagttttatcattgaagagaaaagaaaccaaggcttagtggggctgaactgagggtctgtcatgtagatctgtctttgctactctgtgtgagaacaccaaagggctttcagggctgggcagcagtagagcccaaccattgctctcttagcacattcctcccctccagtcagctggacagagacacagggcaaggcatgggactctgagagcctctttcggactctggcattcgctgcagtggggcctggtctacgattactgtgtgactagttacacattggaaatactctgcaggaggctgccagctgtctgcagggggtgagacttatttagtagccattactaaaacacctccaatgagaaaactggtccagtccaagcctcgggtcactgtagctgaccaggaatcccaggcgatgaggagggcaaaggcgttgacatggcgtgtgcgcatagcccacggacagcctatcgaggacatgtctaagtcaagctggaagaaggtccttctgcatatcttcccctctgcctgaaacttgctctgttagagcaggatactagtgctgactgcccctagtggttctgcctctgctgtaacacccgcttctagttggcattgctggttactacagccctgcacagaggtctgtggctgaattgtcaggccctgttgtctgtgctgtgactgtctttgttcttccccatgcctttgagactgaggtaggcgcatataaatgctcacctcgaacattccaggccaaacaagctctctcagctggatgcctagccctgaatacccactaccccatcgggaccacactgccaggcagagcaaggaaggcctgcacctgtcctattggagtttcagactagccacttgtcttagtggctggtgacactcatgtatatgatacccttggagattttgagctctttaaaagcagaggctttattttattctctgcatcagggctggtctcagattagatgcctagcaagtgtttcttgattgaagaaattttcaaatgaacgctaccaagattcggagtctggaaagtttgcaggttttgatcatcaggaaaggctacctgcaagagggtggacataagttggttcttgaaactgggaatttggggagccagaggagccgatggggatgtctggcttctgggtaccataggaaaatccaggcttactgggcagagtgctaatatggtgttttgttttctggtctctctcagtgataacggaggcagccatcttgaagaaacacaacttatttgaagacaacatggccttgcccagtgaaagtgtgtccagcctgacagacctcaaaaccgccatggggtcaaaccaggccagcccagccagaagagtatctgccattctcccaggagctccagataatgagctcccaagtaatgaagtgttccaggagccagaggaaaagaaggagcagcctggggtgcctggctcactggccatctctgcgtccagctgtccttcaggtggggatgggcaggtgtctgaggatcactctgctgggggccctctcactgtagagaatacagcaggacccctcagctcacacttgtcagaggtggaagctggggggacccttaaagatgaggaaccaacctgccaaagtccagagcctagcgctgtgccagggtccctgaaggaactgaaaaagttgttgactgtgacggtgtccgtagagtctgccccggtggttgaaaatgatatccacaacgggacacctgttccccaagagaatataaaagaagaagaaagcaagatccacccagaagccagccacccagctgccatccagcaggacagctgtgaagaaagggaagtcagagagaaggaggcccagcctttggaagctgaggctcctggggtggacttggggatactgccagagggtagaggctctacctctcagtccaccagtggggggctcactgagaacaccagctgtccaggccccatagaggagccatttgaggctcaagagccagcagagaaggtgctcccagccatagtttctacagaggacagcccccaggcaggaggtgaggctgagcattcggtgacagtcacacctcaagaagatgccacgttaagctctaaccccatctgtcccatggagagcaatgaggtggcccaggcttctggggatcaagaagtgctgggaggggaggatagctcagcccttggtatggatacagagcaagtcaatgatactcatgagcatgcttgtcagtggctggtggaggataccctgagcactgacatcctagccgtacatgattttgatgtgagctccccagagcagccctcagaggagtggtaggaacagtttgctagccgtttttcttttaaaactgtcagcaaggggggtcttagttatggggtatccttaggggggttgcatgtgacttgctataaaagttatgaaatatttctttgatttgaatggtgaagccagaggaaatgtctagcgggtgtgagcgctgagctgtctttgaggagctgaagtgctccctatgaatgatcgctttagcattttagtagaaatggggtaggagaactggagccttgggggtgaaaggcagttcaaggggctccagagaggggccagtgtaggagcagcaaatgacacctcaatattctcttcaccgaaacatggtacacatttcgaactgcacttgaaggcattctaatcaagcacgtgaaggactccagccacaccacccactcagtcggcttcactgtctcttgtccacaatcaggccacacgaaagaggaagttgggaaccaggcgtccctgtcctgtaaagtacccagagccactcacggctcgtagatctcaggtgatgcagagcagaaatccaaggtgaaaggtctgtgcagcatctatctagacctgttcctaatcctgctatcaattccttgttggttaattttgttggtttatattaattaatcaccttttaaggaaactcagatggggcaagagatttcattggcacaaattagcctt

SEQ ID NO: 215 - DNA, 3467 bp, Mus Musculus
gcggctcagcttccagccagctggacgagggcaagtgcgcctacatccgagggaaaactgaggcttctatcaaaaacttcagcccctactacagccggcagtattctgtagctttctgcaatcatgtgcgcagcgaggtggagcagcaaagagatttaacgtcacaatttctgaagaccaagcccccactggaaccaggaacggttttgtatgaagctgagctctcccagtttgctgaagacatcaggaaatggaaagacagatacattgtgattaaaaacgattttgctgtggaaagctatgagagcaaagaggcctatcagagaggagctgttcctaaaagcaggattcttccagccggtggcaaggtgttaacctcagaagaggaatatagtctcttatctgataagcatttcccagaccccactgcttccagcgagaagaactctcagccctttgtgctcctccctaaggcattcccagtgtacctgtggcagccttacctcaggcatggctacttctgtttccatgaggccgccgaacagcagaagttcagcgctcttctcaatgactgcatcagacacctgaaccacgattacatgaagcagacaacatttgaagcccaagcctttttagaagctgtgcagttcttccggcaggagaagggtcactacggctcatgggaaatgaccaccggggatgaagtccaggtcctgagtaagctggtgatggaggagctcctgccgaccctccagactgacctgctgcctaaactgaaggggaagaagaatgacagaaagagggcctggtttggactcctggaggaagcctacaatctggttcagcaccaagtttcagaaggattaaatgccttgaaggaggagtgcagagctctgacaaaggacctggaagggaccatccgctcagacatggatcagattgtgacctcaaagaactttctaactgggaagatccgagcaatggtggctcagccagccgagcagtgctgtggggagagcgtgcagcccttcctggcgtccattctggaggagctaatggggccagtgagctctggcttcagtgaagtccgtgcacttttcgaaaaagaagtagatgaactcagtcagagcttccatgctacccaggacagtgcccagctgaaggagggcctacagcagctaatgaagcttcctctggattctgtgaagatggagccttgctatactaaagtcaccctgcttccagagcgcctgctggacctccagagccgcttcaggttccctcacgttgacctggtggtccagaggactcagaactacatgcaagagctcatggagaatgctgtgttcacgtttgagcagttgctctccccatatctccaaggagaggcttccagaataccagtggccatcgagaaggttaagctccgtgtcttaaagcaatatgattacgacagcagcaccatccggaagaagatcttccaggaggcattgattcaaatcacactgcccactgtgcagaaggcgctggcatccacatgcaaaccagagcttcagaaatatgagcagttcatctttgcagatcataccaacatgatccacgttgagaacgtctatgaagagattttgtatgagatcctcctcgatgagaccctgaaagtgataacggaggcagccatcttgaagaaacacaacttatttgaagacaacatggccttgcccagtgaaagtgtgtccagcctgacagacctcaaaaccgccatggggtcaaaccaggccagcccagccagaagagtatctgccattctcccaggagctccagataatgagctcccaagtaatgaagtgttccaggagccagaggaaaagaaggagcagcctggggtgcctggctcactggccatctctgcgtccagctgtccttcaggtggggatgggcaggtgtctgaggatcactctgctgggggccctctcactgtagagaatacagcaggacccctcagctcacacttgtcagaggtggaagctggggggacccttaaagatgaggaaccaacctgccaaagtccagagcctagcgctgtgccagggtccctgaaggaactgaaaaagttgttgactgtgacggtgtccgtagagtctgccccggtggttgaaaatgatatccacaacgggacacctgttccccaagagaatataaaagaagaagaaagcaagatccacccagaagccagccacccagctgccatccagcaggacagctgtgaagaaagggaagtcagagagaaggaggcccagcctttggaagctgaggctcctggggtggacttggggatactgccagagggtagaggctctacctctcagtccaccagtggggggctcactgagaacaccagctgtccaggccccatagaggagccatttgaggctcaagagccagcagagaaggtgctcccagccatagtttctacagaggacagcccccaggcaggaggtgaggctgagcattcggtgacagtcacacctcaagaagatgccacgttaagctctaaccccatctgtcccatggagagcaatgaggtggcccaggcttctggggatcaagaagtgctgggaggggaggatagctcagcccttggtatggatacagagcaagtcaatgatactcatgagcatgcttgtcagtggctggtggaggataccctgagcactgacatcctagccgtacatgattttgatgtgagctccccagagcagccctcagaggagtggtaggaacagtttgctagccgtttttcttttaaaactgtcagcaaggggggtcttagttatggggtatccttaggggggttgcatgtgacttgctataaaagttatgaaatatttctttgatttgaatggtgaagccagaggaaatgtctagcgggtgtgagcgctgagctgtctttgaggagctgaagtgctccctatgaatgatcgctttagcattttagtagaaatggggtaggagaactggagccttgggggtgaaaggcagttcaaggggctccagagaggggccagtgtaggagcagcaaatgacacctcaatattctcttcaccgaaacatggtacacatttcgaactgcacttgaaggcattctaatcaagcacgtgaaggactccagccacaccacccactcagtcggcttcactgtctcttgtccacaatcaggccacacgaaagaggaagttgggaaccaggcgtccctgtcctgtaaagtacccagagccactcacggctcgtagatctcaggtgatgcagagcagaaatccaaggtgaaaggtctgtgcagcatctatctagacctgttcctaatcctgctatcaattccttgttggttaattttgttggtttatattaattaatcaccttttaaggaaactcagatggggcaagagatttcattggcacaaattagcctt

SEQ ID NO: 216 - protein, 725 aa, Mus Musculus
MKQTTFEAQAFLEAVQFFRQEKGHYGSWEMTTGDEVQVLSKLVMEELLPTLQTDLLPKLKGKKNDRKRAWFGLLEEAYNLVQHQVSEGLNALKEECRALTKDLEGTIRSDMDQIVTSKNFLTGKIRAMVAQPAEQCCGESVQPFLASILEELMGPVSSGFSEVRALFEKEVDELSQSFHATQDSAQLKEGLQQLMKLPLDSVKMEPCYTKVTLLPERLLDLQSRFRFPHVDLVVQRTQNYMQELMENAVFTFEQLLSPYLQGEASRIPVAIEKVKLRVLKQYDYDSSTIRKKIFQEALIQITLPTVQKALASTCKPELQKYEQFIFADHTNMIHVENVYEEILYEILLDETLKVITEAAILKKHNLFEDNMALPSESVSSLTDLKTAMGSNQASPARRVSAILPGAPDNELPSNEVFQEPEEKKEQPGVPGSLAISASSCPSGGDGQVSEDHSAGGPLTVENTAGPLSSHLSEVEAGGTLKDEEPTCQSPEPSAVPGSLKELKKLLTVTVSVESAPVVENDIHNGTPVPQENIKEEESKIHPEASHPAAIQQDSCEEREVREKEAQPLEAEAPGVDLGILPEGRGSTSQSTSGGLTENTSCPGPIEEPFEAQEPAEKVLPAIVSTEDSPQAGGEAEHSVTVTPQEDATLSSNPICPMESNEVAQASGDQEVLGGEDSSALGMDTEQVNDTHEHACQWLVEDTLSTDILAVHDFDVSSPEQPSEEW

SEQ ID NO: 217 - DNA, 183558 bp, Homo Sapiens
cgaaagcgctgagattttgtatttctaacaggctcccaggtaatgcttgggaagaactgttgcttcttggacagcaacacttacaaggcaacgtgatcttgagctccacctcgaaggatgtgagctgggaaagttccagctcacagagatttagtcacttgagaaatggtccacttcctccaaggtgtttcttggatgccccaaagggatgaaaacaagaagtgaccgtgggcgaggaggaggagctggccgacctcctcggttgccagcccgtcggagctcaccagctaggcgagggcgggaagacagcccccgggccggcccacggatcatcagaaggcgcggacctggaggaggcgccccagaaggcgacgcctcttgcctcctgtctctcgcctctcgaaggaagtttgctcttaatttcagagccgggttcgccgtcggatcaacctccaggagctagcagcgggcgcggaccgggcagtttccgcgctcagcacaggcagctcgcggtcatgggcggctcagcctccagccagctggacgagggcaagtgcgcttacatccgaggtacgcccgcccgcccgggggcctggggagcaccctgacccgtgcaccaggctggctgccgcggtcggggccccaaggggcgcgccccgggccctctccctgtagcgcgcggggatccccgaccgcagcccgcccgcgcgagtcgggtttcctgccccagccggcgcgctccggcgcgggtgtggaccggggaccgggagggcttgggagcgaggcaggtgcaggatgcgggtggggacgccggcgccttcgccgctcccgccgcctcggggtcagtgccgcccccgcccggcgcacttcgccctccagtacctgccctggactgagttctgagcggtttctgaactggccgccaagagagcagcggggatatcccgcgtttctagagatacccctggggattcccggcagctaaagcagaatttccctcttagtaatgttggcctggctttggaaagcgcggcgttggccgcagcttcgctcgcacttcatcctagcacttgcaggatgatttcatcagcggcaaaaaggacaatgtcatgccgttcccttcccgccccggagaggggcgaagcaaaagaggaacactggcgtgctttgtaactgcccgaaagttacagatggggagaaactcatttagggagaccctcagagatgtggggactcagtagagagcgtgaggctgcaaaacaaacaaaacaaaacccaaaccgaactgaaactgcaggaagtcctgactcgttatctcctttatttcctgggcgtatttggcctcccctcttctcaccccccaccccaaacttgccttcaaccgctacctaacatttggttatcttaccaatttactgtctttcccccgccccgccgccagatcccccaccctcggcttcagaaatatcttccagactatgtattaaactctaggtttatttggcccttgaatcctttcctaagaggaaatcatttatttggtgttcttattccacatttgttttcagtcaccacaacatttaagaccgttttaaaaagatatcaaataagggtacgtgaagagcaacggagctgattttacagattcctgctctggtgcttttggaggtaaaagatcctcaacaacctgtactgtcaggggataacacttggtcaagtatctctttgcttttgtttgttaaaggggaaaagacggatgatttatttatattagtaaaagagctgaactaagcttaaaagaaataaatgaagcctgccttagtcttaaaaatgtggctacatgcttgtgttaccagtgtatagggactgaaagggcaatcaacagaacgtagtgagaaagggcttgcatttgaatgttagcaaagttgtgtttaaggcatttatataagactttatttcactggaaagcttaggagcacctaatgtggacgcatggccaagtacactaatcatttgaagttaagcaatgtgaaggattaacatgcttaaagaagacttcctggccgtgccatttgttgctattgatgcaaacattgtactcagataataagaaaatgctattaatttctttattctgaaagctattaaattattacatatacaaaagtacgagggagttagggcagatgaagaacttgtaatgcaagtgtttgaatgagtaaacctatagcatatggtgtgacagtcattacatttcccagtcttgttcagctttctctcttcattctatattcaggagggcacttgcaaggtatgtgtagtgggagagggaagagaagagttaaagttagaatacctccagggaaaaagactcatcgcttcatgtgagaatgctagtcttgccaaaagagaaaagaaccttggaaaaatgcatggtgttgtacattgttagtgcatgagcaaatgagggtcacagggctgtgatttcctgatggttttgaagcccaggttcctgagtaaaatcatagccctatctttacctctttgcccattttttagcctataaatattctcaagctttgattcaattgtaagcaaaacgattggaagtatgacagtaaagtttaaatatacttttatgacctgtttctcataaagtagccatcagtgaaatatagatttgaaagctcctgaagctgagacaataactttcttttaagcttgataaactttgctaacaaggagagtagctagtcaatatattttgagtgacttttgttaactttattttgtatgcatcataaaccgctgtatgctactgacgctgaatcagcctttactttaagacaaatcatttaacagctgccattccttgtgtgcctcaaaacatctgtgtcatatggatgttttgaaaatacattgtttcttaggatttagttaatcttcaggtaaagatatatcatctacgttaaggagttacttcatttctaaagatgttagtttgggaaattacggcaatgctcatgtttcttacaacagaataaatttttaggattgtttctagaagcctttcagtagtgtcccttgataagatgtttctattaataaataatactgagaccaacttgtgatcacatgagctgtgtcatatgttagtcttaagtgatgcttttagcactgacctaaaatgatcctttttttttgagacagagtctcactctgtcaccaagctggagtgtagtggcacgatctcggatcactgcaacctctgactccctggtccaagtgattctcctgcctcagcctcccgaatagctaggattacagccacgcaccaccatgcccagctaatttttgtatttttagtagagacggggtttcaccatgtgggccaggatggcttcgatctcctgaccttgtgatctgcctgcctcggcctcccaaagtgctgggattataggcatgagataccgtgcccagccaatcttttttttaatgaggaagaaagctcatagattccaggcatcagtgatcagtttgggtgctcttctctctttatgccatgttttcttttcttttctttttttagttttctgagatagggtctcactctgttacgcaggctgagtgcagtggtacaatcactgtgagccttgacctcccctggctcaggtgatcctcccacctcagcctcctgagtagctgaaactgcaggtgtgtgccaccacgcccagctaattgtattttttgtagagatgggattttgccatgttgcccaggcaggtctcaaacttctgggctcaagcagtcttcccgccttggcctcccaaagtgctgggattacaggcatgagtcaccatgcccggcctctttttctgtaaagcttttggtatgcatgaaattaaactatagcttaaaaaaaaaccccaaaacaaaaccaaaaaaccccccacactgtgttttcctgtttatgcaataattttatttccttctaaaaattacccttgaatttttaacgaatcaaaaagaaagcaaacctgaaagatctcccacataagaagtcctgtggagggtcagaaaagtactggacagtcagtgccgcagctgaaaaccatgggataaacagatcctagtgggcacttgcaggcctgccagcagcaaataccagttaggaaaactgttttcccccactggatttattattgcatagtcagttacataatatataaagggcccagtggcttcctccaaaagcttctcaatgatctgatgcttataaaataagaaatgagtttcagctttaaaatagcacatatttttctcagggaagttccctcttatttatacaagggttaacttaggtggctagatacaaagtttaaagtgatgtgtctagaatgaagtctccatgggcaaggtggaggatggggagagctgtacacatctgtagtctacttagtgtggatgtgtcgtactagtccacacatttgcttcttcggtcataatttgttggtgggagatgggcataagaactggtctgacttaacctgaatatttttggtagtgtgatcttagagtccaagttggctagtaatggcaatatactatgatgagaaagttaggaaatgcattatggtagacaccgtggtatgtcaacccaacatctttttcccactcctccattttttttttttttttttttgagacagggtctcactctgtcacccagactagagtgcagtgggacagtcatggctcactgcagcctcgacctccctgggctcaagcgatcctcccacctcaccctccttagtagctgggggtacaggcatgtgccaccatgcccaggtagtttttttgtatttttttgtagagacggggtttcgccatgtttcccaggctaatctcaaactcctgagctcaagtgagccacctgccttggcctcctaaagttctgggattacaggcatgagcctctgtgcccagcccccattcctttttctaacagaactccagttttgttcaggcattaaaactcctggccaggtttggtggctcacacctgtaatcccggcactttgggaggctgaagcagtaggattgcctgagcccagaagtttgagaccagcctgggcaacatgacaagaccttgtctctctctttaaaaaaaaaaaaaaaagaaagaaactcctgatattgccctctgtttcagagacactagccccatttaaggtccctgaaaggtggctgctgattggtctgtacctgttgtggtggtgtggtctccttgccagtgattatagtaggcatgggattatgttgccagctggtcagtgatgcttgaggggaagtttgccacctgcttctaggcgacttttcttcccttttaaaaaggaggcaaagtgaagggcacttcttctccatcttttgactttgttgcatctgaatgtgatgcctgcaactgctgtttttatcttgatgagcaggaggggagctagcctaaagacaaagccaatacttggagcactgcaaagctgaggtgtctcagagaaaagaagctagagccctgacaaactttgctgatagccactatatactaaccctgcataattcgtattatgagagccactaaatcccctttgaattggaatagtgaagattgctagttatccacaatagcattctcccgttatgtttaatgatagaatccccaaattttagctgtccacatgaactcccataataaagatatttcccaaactcctttgcaactaaatgggattatgtagctgagttatggccaatgggatgtagatagaagtgctgttctagaaagtgacattaaaggggaagggtatgaccatcttcgtccaagtctccacactgctggctggattgtaaccatggctggacagctgtcatggaccatgaggtgtcctttcaagaaggagcacatgtagggcagagtaactggacaaaaggaggctaagttcctgtggtttcatagagaagaacctccataccagccctggaccatttacctctggaccttaaaaagaaagaaagaaagaaacttccatctctttaagccagtgttattgtggttttattgttgtccatagacaaacctcattctatctaatacagttatcttctttttacgtgcggcccaaagcatcctaaccagtatactaaatgctgccttattgggtcccctttcagaaaaagtaatccaaagaaagtagaaagtgggtaaagattatagtatttgtttcagctctaaatttgtagacatgaataggcttttgtaagaagtgagaaattgcagctcctccagagtagtggggatggaggaaacaggagaaagagggtccactatgaatagtgcacaaatgcatattgatcactttatattttaagtgaaaaaaaatgccttcaagcatgccagactaccaaggaagctagcaggagtttcaaataagtaaaactactgcaaattaggagttgctagtatcaataattactttctatttcctttggtctttgtgaattgaaaccaatactttagaaatgggaagctctttaggaaaccaaatctcatgttgcaaagccataaaggattttgtgagttgtgatttctaagagtcaaccacaaagacagaaaagacagtagactgagacagattaacattttctcctgtacttgtggaacaaagagtgactttccctcttgtggcttctaatacaagccttgataaatcccatggagttagatgatgaatcaagccctggtcttgatgaaaaacttctttttactatggacgttggctgtaagagggccacatcatcaaaggtgctctagtaatagtaactactaggatgacaatagtaatttttattatcttttactgtgaactactgagctttttactttattgtaatctctgggaaggtttgaactgggttcacaggtagaaagtgcaatagcaggagcccaatttgtaaaggtagtttctaatttcattaatataaatgtactgtgaacgttttacaaaatatgcagtgtgaatcatggcagtgaactttaatctcctaatcagaaattttaattttttttagtatagctgggtaactctaagaaataaggtacatataacaatttgcactgtgaaatgggaaatgaagtcagaagtgaagataaaagcataatggaaaggaagacaggagaataaaagcacaattcatctgctacagtctgtttaaggcactttcccaacagttcaaaactaacacacatatgtacacacacacacacacacacacagagagagagagagagagagggagggaaagagagagaaagagatttaacagaaccccaaatgcaatacagattttctcctttgaaactggaaaattcattttaaaaacagactagcaagttgctgccaatgcgaaaatgcatgccagcttttaaaaagtgccccctaccttggtactgtatgttttttctcacttagaaaagagaataaacgctttagaggtatgaaagcaattaattcacttttgcaaattgcaggttctaggacctaaggaagtttgtatttctatgcttgatgttgtatggaatgagtctataggattaaaataaattaatagtttttactaggagccccaaagtgacttttaaaaggtccatggtctcaaggaattttggaagaagggtaaatgtctctatgccaaaccatgtggttttttttctttttcctttttaaaaactatttttattttaaaagaaaacataggcccagacagccacacaaaacaaatgcatagcttagtgaatcattataaggcaaatacttagtagccactacgcaggtcaagacatagaaagagcttcactagtcatcaaaggaggcttctgtgtgccccgtcccagttctagacctctttgtttctccaaaaatgaccactattttcagttatctatttataactacctcaaagatcctgactcttaaaacaggtatttatttgctcacaattctgctgaactgggtccaggctgggtggttctactttttatttttgctggtggtcattcctgtggatgcatgcatctggtggatcagctggtggctggacttagctgacaaggctttctttctctccaggtggcctttctacatgacctctccaataggatactgaactgtttaaatggtgggtcaggatcttacattgctagagtgtaaaagcatgtagaagcttctaggacttcttgtggcttaggcctggaatggcgccacattactctgccacattttgttggttaaagctggtctcagagccagcccagattcaagagaggactacacacaggcatgaacacctatgcaagggctaccctggtaacagactaccacctcactaatcctagcttttataataatgtctgcctctatttccttatggtttcatcacccaactatgtatttgtaaacattatagtcttactcacttaaaaagatgtctcttttaatctatacatttcccttacatcttttactcgcagattatctgttgaaagacttgagctgtttgatatgcagagtttttcacagtctggagtttactcatggtgcagttccacacatttctcctgtattttctacaaattgacagagatagtgagacttgatcagtctcagaatcaatccttttttttaacttttattttaagttcaggggaagatgtgcagcgcgtgcaggtttgttacatagggaaacgaagcgccgtgggggcttgttgtacagattatttcatcacccaggtattaagcctagtatccattagttatttttcctgatcctccctctcccctccaccgttcaccctctgatagggctcagtgtctattgttcccttctatgtgtccatgtgtacttacctatcatttagcgctcactcagcagtgagaataaatggcatttggttttctgttcctgcgttagtttgctaagaataatgacctccagctccatccatgttcctgcaaaggactgcatgcatgtattcattgcagcactattcacagtagcaaagatatggaatcaacctaaatgcccatcaataaagaaaatgtggtacatatacaccttggaatactatgccgccacagaaaagaatcaatccttttgtgaagactataggtggtggtgtgtattcttctcttttttttttttgagatggagtctcactctgttgcccaggctggagtgcagtggcgcgatctcggctcactgcaagctccaattcccgggttcacgccattctcctgcgtcagcctctcgagtagctgggactacaggcgcccaccaccacacctggctaattttttgtatttttagtagagacggggtttcaccgtgtcagccaggatgttctcgatctcctgacttcgtgatccgcccgcctcggcatcccaaagtgctgggattacaggcgtgagccgccgcgcccggccctgtgttcttcatctggaggcacataacagctggctgcctctctttttgtgatgttagtagctgttccattgatacttatagctgagacccattaattcactgggggttgaactgtctccgctttagaggaacttgaaattcaatgagaaatagaattaaagtttttgaacggtgaaataataaaggcaacatatattaggtacttcaaaatcatctctaccctcttggaaatgccaccatgaatttcagtattctctgattcggcccatgagcaacactggccaggacagacctctctttcctctccgccaaccttccctcttgtcttcccctagaaagctgccatggagtcttcgttgaacccttaccatgggacagacactgagctaagagcattgcatgcatgagctcacataatcctcacaacaccaaatggagatatcattagctccgtttcacagaagaagcaatcaaggtttacagagaatagagaacctggccaaagtcatccagccagtatgtagtagaagaaggtttgaacttaaatactttctgcctccaaagtccttgctgttaaccgagctgtgctgcctcccagatggtcacagtcattgctcctttcatctgaatttcctcttctctgtgcatgctttttctcacatgagtaagtatcagaaacttttcctgttcttggattttaagccttctggttttctttagagcactcggaaaatcctatcttttgctagaagtcctgactgaagggagctctgtgaaaaactccccatctgcatcctaggcaaactcgttgtcccttccactcctcagcagtcactcaggcattaaacacttacaggattctcattcctgcaaactattaccatcaatggtagaactgaactgaactcattgactggaaatgtatggctcttggttccttttttttttttttagcttatttagtccagtcccttggtttatttgtctaatctctgtgctggtataacaccgatttagttattattgctctatgataaatcttaataaccaaagggcaagaccctctttcttcttactcattgtcagaaggtgtaggctatccttccatatttgttaaactgttaatttcatgaaaaaccattttgtaattttattgaaattgcatgaaatctacagatgaatttaggaagaagtgacatctgtatgatattgagtctttcaaaccttagtatggcacatctcttccataatacatgcttttctttcatccttaaagttgtatagttttctacataacaattttacaaaaatgtttaataagtttatttattggtgcctttcactttttcttactattgggattgtgttcttcttttctattgtattttccatctggttattttaagagcaccagaaagctattttgtttttgcatgttgatctttgtatcctacaaacatctcaaggcctcttattagttgtaataatttgttcattcactctgattttttgtgtgcatgtattatctgcaaatttgacagttttcaattcttttaaatctttatacctcattttttattgaatttactaggacctccagcacaatattcagcaataagaatgacagcaaacatccttatcctgttcctacttgaaaagggatgttccccattttgctattaagtgtgatgttaaccatagatttatggtttagcttaaggatactccccccttttcgttaagttgcttaaaatttttaatcataaatatatactgaattttattaaagacttgattttttctaataatattttaatgtggtcattagaatttcaatatttaaaatattgttccattgctaagatataccctacttggtcacagtgaaatgtctttaaaaaatttttatttttctattacatggaattttgatttgcttatgtatttttttcttactttaccacttgcattaataaaagtcatacaaaatgaaaaaaaatttattgggggttgaaaaatggtgatattctaatatgtcattttgttttcatttattagctgggataattttatagagcaatacttcccatatctatcatttggttacctagtatgatagttcaaaagcaggaaaaaaacattattttttccttttatttaccagtgtttaatataagttactggtttcttgacatcccttaaagatgatcaattgactataaaaatcattatgaactcacaaatcccattgtaattcttattttattgaagctccaatttcccatcattggccaatgaaaaactcttcaagttggctcctgaatcttttggaaattaccccagtagtatttgatagcttccttgccatctggtatgtcaagatgttttaggttcatcctgtttctttcctgtcccatacagggagtaagcaaaatctataagaacctctgatttcttttagtgggaaataatatttcaatattacaatttgaatctagctatgtttactgctacaactgggttggccattatttctggacttttttagtttatagaactagggaaaatatatctttttaatattatatttatacatatccttttccacactgagaatcatggttctcaaaggcactaggcaatgatagaattaaatatacacaaattctcatttgctttatcataccaaatacacacaacagtctcagaataataatacaaatactgccatcatcaattatgattatggaaagctgttgaacaaactgtttttaaaatcagagacaaactttttgtatatgctaatccaattcttccccacgtttattttatgattttactacattaaaccatataatcattatattctattctcttttctcattcactctttgtttcacaatgaagtgttatttaatgcatcagtccttatgttgatgtctctctctggtgtttagagctcatcccagtagattcctcaagaagagctcatgggaacgtaacaaagaagtatgaagataggattaattaagtggctcagtgatatcaccaaaagccagcttatttcttcctactgtctgtggcccaggtctcttatgcttgaaaggtggctgcagcagcaaatagtattaaattcttacgcacagcaatgtcctagaggctaaaaagagatctgtctattctttgagtctccttataagagcaaagaagcctttcccagatgccttactagcagactttcccttacatcccactgatcaaaatggggtcacacattccttcctaagccatcactggcaagagtatggaattatcatgatttggttagaccaatcaagattcacccctgaactggggttagagccatttctctgaagcacatggttatagggagggtcatggatacccaaacagaatcaggttcagtttagcaagaaggaagcatgatggctattaagtaggtaaccaacattacagattttgataagtgtcacgaagggattaaaaacagcactgagatagaaaactgatggtggcaattgggcaaggagatgagatagacttggctgtggtattcagaaggataataagttgctatctgtgtgaagaaccgggggagtatattttggttagaaagaacagcatgtaggctgggcgcggtggctcactactgtaatcccagcactttgggaggccgaggcgggtggatcacgaggtcaggagacccagaccatcctggctaatacggtaaaaccccgtctctactaaaaatacaaaaaaattagccaggcgtggcggcaggcgcctgtagtcccagctactcaggaggctgaagcaggagaatggcgtgaacccaggaggcggagcttgcagtgagccgagatcgcgccactgcactccagcctgggcgacagagcaagactccgtctgaaaaaaaaaaaaaaaaaaaaaaaaaaaaagaacggcatatagaagggggaggagggggaagtacttgaaggaattgaagaaagggtgttatgttgggagtgtagtgagcaagagggaggtttgatgggaggggatgcctattaatattttgttgcctggctgagcgtggtggcttacgcctgtaatcccagcactttgggagtccgaggcaggtggatcacctgaggtcaggagttcgagaccagcctggtcaacatgttgaaaccctgtctctactaaaaatacaaaattagccgggtgtggtggcacacgtgcctatagtcccagctactttggaggctgagacaggagaatcacttgaacctgcagtgtggaggctgcagtgagccgagactgtgccactgcactccagtctgggcaagatagagtagactccgtctcaacaacaacaacaacaacaacattttgttgttgttgttggtgttgtctgtctgccaccactagaatgtaagctgtatgaaagcagggtctttgtcttgattcattgttatgaaatgaatagcaccctcagcaaatagatcagtgtttggttcacagttcctgacagataaatatttgcttaatgcatgaatgaaaggagaagaaaaaattttaaactgtaatgaatatcttagaaaataagagaagtatttcatttgtaaaacaagttcaggatgtgatgaagaaacaataatagaataagaaagagctcttggaaattaaaaatctggtgatcaacattttagaaaatacaattggtgccttggaaaataaagttgaggggatcttgcatctaaattctaagatctaaaattcttatttaaatttaaacagtacatttcaattattgttattaatttaattcttctctctaaaaaatcattttaagcatgtatatgtcagatattacacatttgccatagttgcttataaaacttgtctttattttaactttaagcctctgtctgctttgcttagacaatagagtacaaagattaacagatggaaaatagaagaggcaatataaaaaaaattaaagggtcaatccaaaaatttcaatatctgactaacagaagtcccagaaaacaagagaacaaagaaaatgaacgggagaaaattattaaacaagtaaaagcttattttctagaacagaagatcatgtgtctctgatttatagggccaaagaattcctggacttcactcagagctggaaatagttcatgcttccatcatccaaagtagaaaggccttatgatagatatgagttagagtcttcagcagtagtgagcagaaattagccctagactagaaggctgctctggacctgctctaataaaaatttaaaagcaaacctcaaacagatcaaactgatcccaagtaacttaactgcctgcttgaataaagtgcaaattctttataagaatgcaacaaaatacccatacaacaatgtaaaattcacaatatctaatatccatcatccagttaaaaactatcacagtaggcagaagaagaagcaggaaaatatccacaagtataaagaaaataaatcaatagaaatagactcaggaattatagacatggcgaaattagcagacaaagatggtaaagcagtcattatatgctccatgtgcgaacacagaggcaaacgtgaacatgatgagaaaaatggaagatataaaaaaatcttcctagtctccagtcttcaggcaagagcaatatgactactgtgtttctgtagcctgctggaacatctaggcagaatgtagctgtactgccctgctaccaacattctccatggagttgggagaggaacgaagtagcctgcagagaactgaatgtacacagggagctgctgagatgtggctggtctggggccagacagctgagcaggatcagttcagaaatgagggaaaactgtggatgttcctttaaaaagcacatcattattggtggccttgtgcccttaattctggttcgcacacagaacaagtgacaatttccatgattagctaaaaagaattcagagattttccaaatttggattgaatgcgtttgtttaaaggattatttcctgtgtaactcattcaacacaagttatacaggaaaaattgcctaagcaaagcagatgcaggcttagagttaaaataaagccaaattttatgagcaacaatggcaaatgtgtaatatctggagtataaatatttaaaatggttttgttagagaggagaattaaattagtaacaataattgaaatgtatggtttacatttaaagtaagtaagaattttagagcatgactaagacctgagcatgtcaagtgagatatcagttcctaactaaaaatgctaactcctggcctgagaaatgataatcactgtagtaaaagctaacatttattgagtgcctactatgtgccaggcaaataaatatcttagacgaaaggtaacagggtatcaaatgctcttccagaaattctaagtgtttcttttagaaattccaagtatacatagctttttctttaatgaaaaggagtatcagcgtgataggatttgaacgctcagctgctttagctaccttaaatgagctaagtggaaacatttactaaacttttgattcaatatcttaattctaaattatttggctatttgtgtgtgtgtgtgtgtgtgtgtgtgtgtgtgtgtgactcctctgtcacacaagctggagtgcagtggtgtgatcttggctcactgcaacctctgccttccagcttcaagcgattctcatgcctcagcctcctgagtagctgggactacaggctcctaccaccacagttggctattttttattgttttgtatttttagtagagatggggtttcactatgttggccaggctggtcttgaactcctgacctcaagtgatccacctgccttggcctcccaaaatgctgggattacaggcgtgagtcactgtgccaggcctttggctactttttgaagtggatattttcagtgggtgagatggtagattataaatagcttaatccagaaattaaaagtcacctaaatgttagcaacacctaatatggaatttatgaatagcccaaagcagcctttgcagccactttaagctaactttaaataaaatgatacctttatgcaacttcttcattatcaaataaaatatttatatttgggaagtaaggcatacaataaaaaataaataaatggagctttcacctttggaaaacaggcacgataatttcctgaggactcgctgaatctgaagttggattctgtggagattttggacttgtcaactggctgccttcagtttctcctatgaaaatgaggacagtagtaatgcccagtgagaaaaggagggtcagaaatgaataatataatgtaataaatgtgatataattctcacatttcccagtcctaccattatgttaatcaatttgttttactatcagtaatggcatcaggcctttgcagagtaaatgattggctttcacatactgctgaataatacctagcccacacatttgttctgcagactaattaatgtttcagagtgtttaaacacaatgcctctacagaagcaatggcattataatgtgttgggacactctagtgttgtaattagtactaattaggttcttttcaacagcttgttgaatttacaaattactgcctgtgaggtattctgctttatttattcattatgaaagagtcggacgcagggtttaaataggcacctttaaacaactattctcaaggtcctacacatactcctcccctcaaaccagggaaggacaataggaagacacccttctcggaatggttgtgagggagagcaaccccagtgctgtgctaggagctagctcacactggctggcaacagctgaatccaggcatcttttcctaactgtgagctcagtgatatcacattgatagcttgaaaccagcgatggtgggagtctttttgtgttgttgttggtttttgagacccagtttaccagcacatcactgctggtgtcttctcttcaatgcagggaagctggtggcaatgttaaccagtggcagtggcctgaagccatgtttcagttgtacattaattagaatggtctaactgctgaaacagacatcaacgctcagtggcttatagtgatttgtatctcactcatcacactatccagggtgatttggtggggggctaatgaagggcagtgggcttgtgtgtggacccagactcttttcatctagtgcatggtaccatggacacctttggtggtttgttaaagcctatggacccctttttagagtaacatttttaaatgaaaaaaatatagagaggatgataaaagaaaccaattttattgaactgtagttatcaaaatatttttaaaatctgtgatatggtaatatatgtgctctttattaatgcattcaatgacaaggtctcatggagggtttaataactactgtcattttgaagaagtgctattctaagatatgcagcaacttaaatgtgctacgaaaacatctgtgagctctattggtgacaaagtcacaagtactgctaaattacactgttttgttgcctacattcagggttggagaagtgctgaatttgagttgaaggttaataaaacacaggtgttcttttcctccattcagtgtttggatggcctgaattctatccacagagcccatgagggtctacaggctccagatcaataatctctgacctggctgggcatattccagcaccttagaaggcccaaggcaagaggatcgcttgagaccaggagtttgaggccagcctgggcaacatagtgagacctcgtctctacaaaaaacaaaaatgagccaaatgtagtggcgcatgcttgtagtcctagctgctaaggaggctgaggtaggaagatcgctggaacccaggatcaagagatgctgcagtgagctgtgattgcacaactgcattccggcctaggcaagagtgagaatttggctctaaaaaaaaaaaacaaacaaacaaaaagaaaaaataatccctgacctaatggctagtggcttcatgattcttagggccacaaagacactaagtggacactgtgcatacatctgcagataagggcagatagacagtggaggattatgtgggtagattttgtgctccaggcctggaggtggcatacattatttctgcccaaccttctcatctctacatgacacaccttgcctttgtatctttccattggcaattcctgtcaaaagtcctatcccttgtttttattgtcactttttcctttatatcaccctcaacatgttgaacctaacatttcaatgaatacattttctactttaagtggattctaattttgaaggcagggtataggcttcatattctttatgtaagaaaagttgagtctgggctctgtggctcacgcctgtaatcccagcactttgggaggctgaggcaggcagatcacgaggtcaggagattgagaccatcctggccaacatggtgaaaccccgtctctactaaaatacaaaaaattagccgggcgtggtggtgcgcacctgtagtcccagctactcgggaggctgaggcaggggaatggcttgatcctgggagacagaggttgcacactccagcctggtgacagagcaagtctccatctcaaaaacaaaacaaaaaagaaaaggaaaggaaaggaaaggaaaggaaaggaaaggaaaggaaaggaaaggaaaggaaaggaaaggaaaggaaaggaaaagaaaagaaaagattgaagccttttatatctatttgtccattgcagcagccattagggacatataactaatgagcacttgaaatgtggctagtccaaattaagatatgatgcaagtttaaaatacacaccaattttgaagttttagtacaaagaaaataatgtaaaataattaatattatttaatacaaaactgctatttaatagcaattacatattgaagtaatacaattttggccctatgattgggctaaataacatatattaaaactaatgtaatcagtttttaaaaaattttaatgtggctactggaagaccaaataacatttgaggcttacatctatggctcacatggcatttcttttagacagctgttctcgaataaagattcatagaagattcatagagctgcaaggaaacttagagataagcatctaatccaactcttttattgtaatctcagaagctgaatgagctgttctcatctgcctagctagtaaagcacacataggcttggaattcaggtctccacactcctggtgcagagctcttttcataatccatggtatccaaccaaaccaaaccaaacatttccaagatttaagtttccagttcaaaccagaatatactctgattctgagttacacataagcatcccgaaaatgacaagccttttttccaatctgatgtattttcaaccctagacttaaaacttaagtataatttgccctgcccctgaagaactgcaggcacaagcagccagccagacaggctcgtgcttgactccctcattaacccagataaaagaggccctgaggtcatttgcctttgccctggtcttctgcatttcccttagctgaatggttaaactcacaaggaaatgctaagattttcttatctcttctgaattttctcttaaagggatggaaagatatgaaaacctagtatttcacatgactacccctttttcctagccaggaggtggcaccgtggatagcagttaagggaaataacagatgagtttcattctcttttgtctcattttctgttcttggcttccactctagacctataaccaaattcccaaggtctggaatattttctgaactttttgtcctagaatagtccaaggtttcccccatccaacttactctccctctctaactcaccgatttccataaaatcacatttgagccgttgtgtatgtagataatgtttcagataagggcttagatgtttaaaaagtttcttatcttaaacaatgtagtaccaatacataatctttcccccttaggaattttgagtaatgaagtgctccttgaatcatataatttgcagttgaaattgaaataacataattaccttatccagtgttctttgcaaaacaccgtcactagactctgaggttgtctcattttctctgaactttctcacctttttcagtgatttctggaatgttaagttctgagaagccataagatatgtctcctgacccatgacaactttagtgactaacccacttactcacacatttcatgtttcagcatttcctcccttcggtatcattatttggcacttccacgagaaactcctgaggcgtactatagctaactactttgtttatttcagatcatcactgctattgacatcagtggatgtctgagaaagggagcacaaaccttcatgtctccacatgtttttaatgaaaatatttgatgccttaaggtgtgctgataaccaaactcagcatttctccagggatatgtttaaatttctgcattgttcattctaaggagaaatatacacatatgatgtattttgcaaatgagcataagtttcactaagatatgtaaaagacgctttcaaaatgatatttataatatgtctcatttttagaagagtggacaaaataaaatgaacttacagagcaactaaacccttaagaaacatttaccataaaatgttaactgtgtagctttcttgattcagtagggcattggctgtggaggtagagcacccaagtacagataatggccccatctcttgctagctgtgctaccttctgcaagttatctagcctcctctaaccttggtttcttccactacaaagtggggataatagtacctccgaaggctgttgtaaagactcattgcactaatcctcgtaaagcacttaacactgtgatagggacatggactctcaacaactggttttatcacttataatagtataccttctgcaacctaaagtcaaagattttaaataaactgtacatcaaataaaatacttttcttcaaaatccttagtcaaccattcctggagccagttggaatcagaactgaatttctatatattttctataatttatggagttgagacttcagtatgcttcagacttaatagacagcataaacttgaggggcaagtacatgaacttggtgtagaagaacttgtttgaatcctggttctggcacataccatgtgactttgggcttgtctttaggcctcggttttctcattagtgaaacaagttgtttaattgattgattaagtcttttcaaaaaaacttacttaggatgaacttataaaccttaatttgcagcatttagtttagtccaagcttgtgcaatccatggcctgtgggctgcatgtggcccgggaaggctttgaatgtggcccaacacaaatttgtaaactttcctaaaacattatgagatttttttgtgtgcaattttcttttttagctcattagctatccttagtgttagcatattttatgtatggcccaagacaattcttcttcttccaatgtggcccggggaatcccaaagactggacacccctggtttagcccttaaagcctcaaacgtcatggaacacatctatttctttttctttttctttttttgagacagggtcttgctctgtcgcccaggctggagtgtagtggtgcgatggctcactgcaacctctgtctgctggactcaagctatcctctcacctcagcctcctgagtagctgggactgtaggcatgtgccaccacacctggcttattttttcaattttcttttgtagagatgaggtcttgctatgttgcccaggctgatcttaaactcttggactcaagcacttgcccaccttggcttcccaaagtgctgggattataggcgtaagccatcatgcctggcctatctatttcttataataatgaagcattcattgtgtgtctttccttctagtcatcaaatagaaatatgccctgttctgtgaaacgggatgaacaaagcagactaaatccctgctctcatgggacttacatcatagaggtggtggtagggagaaataaaactaagaaataataagatggtatcattaccaaggatgatgaagcagggaggtcagtgtggttacggaggaatgagcaatgggaactgtgagcagagacagggcagcaaggtaggtgggatcacatctcagggggacttataggccattggaaggacttgggcttttactctgtgtaagaagagacgccatggggagtttcgaggagaggaacgccatagtctgaattatctgactgttgtgtagagaatagactgtaggggggacaagggaggaagcaagccaaacaggaagaagctggagctgtgatccgggccagggattatggtggtgtggactagggggtagctggaggtagggagacatggttgggttataaatacattttggaggtagagctgacaggatttgctgatgaagtatgtggaatatgaggggaaaaaaagtggcttcaaggatgactccacaatttctgacctgaacaaaagaaagaatggagttgctgcttattgaaagaaggaagactgggggaacacatttgatggagaaaatgaagagctcacttttggacaggctaagattgaggttcaagtggagatgtcagctaagcagatggatgtctcatctgataatcactgtcatttgttaagtggcatccttaattacctgccaggcactagggtaagaacattacacgtgttacctcatctaaattctcataataaccctccaagataggtactgttatcatttgcagatggtgagactgaagcccagggagactgtggcaaaggccacacagctaatatttaatgcacatggtcctccttgaagccaatgcctcactcttgcatacaatgtcactcactacatagccatgagaggaggcggctgggtgtcagaaaaactgagctgagttcgtgctcccatgaggagtttgctgtgtggcttatatccattgcctcaacctctttctgtcttaattctcatggataccttgaaggttattgaattcaagtcagaaatatcacttactatttaagagcagaaagatgctgatgatatatgctcacaatatattttacttctgaggattacaagtaattttcagcaccaaatactgtaattcaagggagcggtaagaactgtcatgtaatgaaattattgtttcccaaggaaatcaggttggatgctgttctatgtcgattattgtcttcttttatagctgaattaggcatgtggccatgaattttcatttctagcataacctaatcgaaaaccagcttcttatttgtgatgctactgagcaagtgaagtttttcaatctatatttcacgatagcctttagatgaacaagcagaagtataatcatgatgttctcatttgcataagcatcttcttgacaggtcatcagatatctttattgttcttgggtacatttcatgggctgctgaaagcgtgcataatgatctctagcaattcatctttttacctagcttaatggcccttgttacatattaggagaatgatggagtgaaaagacaatgtgtctggggcctgcctgcctaagaatgtggagaaaattacattggggaataaattatattaactccttctcatcattcacttaccttttgtaaatttcatctcactatgctaaacaatcctggatggcctgggaaaaaagtcgtgcaccttctcactaacaggctcagattccttgttcatcgttaagataatagagaccattatattatctcatgagattatctgcatctaaattaacagactcctctgcactagtgaacagggtgaatgcattcatttgggttggggttgggtggggttcttacctttataactcttgttttttttaaaatgattttggagataaagcaaataaaaaatcattatcttgatagagtagttttaaataaacatttgatggaattatctttttattgtttcattcttggcatccattcaataataatgatggtggtagtgatggtgatgactgttgattgcctgggggtgcaagagccttacctatggctggtctgtgacagagcagggaccccaacccagtactgcataattttctgtggatattgtcatccccaatttccccattagaaactgagacctaaattctagtctgagattcttcacttgattatgtgccccttagcataatcctagttcagttttaatagtcactctgaaggaaaactttttcacaggactaatgactcctctgctttcaaagggaagtgcagtgtgctatctcttactcttatttaaacttatagttagttggacaagcaggagaaaaacttgggtagccatgtgactcaatggaaagagtggaagaaggattggggcagcccatgtttgggtcctctttgcgcaagttatataactgagcctcagttcctttgtatgtgaaatgggataataacaactaatttacattttgttgtgagaattaggttatgcgtgtactgtgttcataagggctcaataagtggtggttattcttattactataagccagtttatttgaacaatattccactttcatttatttatttatttattttttgagacggagtctcgctctgtcgcccaggctgtagtgcagtggtgcaatctcggcttactgcaaggtctgcctcccgggttcatgccattctcctgcctcagcctcccacgtagctgggactataggcgcccgccaccacgcctggctaattttttgtatttttttcttagtagagatggggtttcaccgtgttagccaggatggtctctatcttctgacctcatgatccgcccgcctcggcctcccaaagtgctgaatattccactttcaaagaaaagaaaatctctcaccaaatgtcagagtatagcaaatccaaaagataaatccaaaagattttagaacaaaaattagggaaaaatattaaaagccattatttttatttaaatattttaagtaacaattctgattctaaattactacataaaacatgaagaaaaatagaaaaaaataaattatccatgatccttcaatctgttgttaagtaatataagtatctatttcctttctcttctttctctttctcttttcaatgtttcatataaacatatccacacacataaaaaacaaaatttgggtcatattttgtacaaatcggtatactgccactccacattatattgtaaacatttcccttatcattaaatagtctccgaaatcttaagttttattggctgtggaggatgctggctgtcgtatatcctgtaatttatttaaccattctcttcttgttggacatttaggtcattttaaaattttcattattataaataatattttagtgaacatcctaatgcataaatatttatatgaatctctgatcactttcttagaattatttcttaggtgtcaaaatgtgaataattttttaaaattacagttttaaaaagaaaggccatcatagatgcataatatatcagccacactgaatttctaacctcttggaacacagtaactagtctggactcctggtagcagaagttttatcttattcattttcctaccctttttgtgttccaggatatctgtcctattaaggtcaacttgcttgtggcatgaatgaataaatgaatacatatatgctttgaacaggagttaattgagtctagacctgtttcagatagaaatgtgctggaattagctctttctaagtaccatatatatctaagaaactcttgaaaacaaattcataagcttatataatgactataattcttattcctaaggattttttttttatttcctatttttgaatatcccaatatgcttatctgggagtaggttgaataaataatttgagagttctttttctccattatttttccattttgctggaagtggaacatttgggggacatttctgtatgtcttatagtttaaggagattatggtaaaggaataaacatcacgtgcttgctcttttggaagggaatttaaaggtcattaaagataacttcatgcttgaatgcccttaccaagggggtaagcagctttcaatacctccagtaataagaaactcactatctcctgaagccagtcaattcatatttggacagttattttgttagtgaattgtgccaggactgaattcttcctaatttctgcaccaccccttggctcacacttagctcctgtgccaagtcctctgccacttcctcttgcctaggcccagccagctctctctggcctctggcccctggtcagcacaaggctcctgtctgtataggaaggggggttcaatatacaggaatctgggcttcaaacccaggattatttggtcaaagccaggccttttaagaaattattgctggaaaatatacatatttatcatgttaaacattggcaacttgcaattcagcagcattaactatattcacaatattgtataaccgtcaccactatctactcccaaaatgttttcatcatcgccaacataaactttgtgctcattaaataactccccattccttctcctcccagaccctggtaacctctatttcactttccatctatgaatttgcctgctctgtgtacctcataccgctaaataatacattatttgttcttctgtgtctgaagccaaacccctttttactacagcaccctaccttcatagcatcgctttctatcactaatgcaatttgtctacttaaccttcttaaagtcatttgagtacaagagctgtcatacttttacaaagatctcaaagacttggactacatgtcatttgatccaacagaaagcaaggtaggagaaacaatgcatttcttttcttttcttttcttttttgagatggagttttgctcttgttgcccaggctggagtgcaatggcgcggtcttggctcaccacaacctctacctcctgggttcaagagattctcttgcctcagcctcctgagtagctgggattataggcatgcaccaccacgcccagctaattttgtatttttagtagagacaaggtttctccatgttggtcaggctggtctcaaactcccgacctcaggtgatccatccgccttggcctcccgaaacaatgcatttctttgttttgaaccatgtactccttttaaggcagctttttcttcctgttgttccagatttctttttatgaaaatatgaagagtggagaatgtggccttccactcccaatagcaggtattctagtttttattctgctttttaaaagaaaatatctctattatttctccaataaatttgatagcaacttttagtttagaaacagttactatttatgatctaattttttatcatgaaatttcaagacttcccattactgtcaactccataatctttcctggtattacagttaagctccaaggcgtaaataaatctgcatacatttccattcatccttcctctttcctctttttgagaatcagatctacaattgtccattcaactcttccagcactcccacaggttaacaatagtttagcattcttatttgtaaattttctcagcatgctggattgttgttattttatagcatctcaaggctcactttaaatctctttactaatcctcagcttcctttttctgtaaccatatttagtctactattttaagtctgaaaatcactattcttggaagagaagtaattgcgaaagtaataggggagcagttctcctttcactttgttattccagcaacatgatgtcattggtgccaaacatctggcttatttctcccttgtgttccttttgtgcctaacataaccattagaatgcttcttgttgttcttacaaattataggtctcaatctatctgtccctgtttttggagagacccaaaactctcttgcatttgttcttgaggagcccctctttcttttttttttttaatcccagcgctttgaaatcaggtcataatagaactatgtaggaacctccatccttccttccttggtggaatcaccatctgtgactatacagacaaaattgtccatagtctgcggacagatggatgctatttgactctcattcagaacgctcttcccacagagtcatgatgctgtttctgctaattcttttgaaatctgccttcttgaagtccatgctttcttgtcatattttcagcgactctctatctggctatcagaaatgtcagggtaaatgtcttttgtctattgctgttggaatggagtgggacaattaaccaaaagaccgttaaagtagcaaatcattaaaagatacacatatcttgaatcttttaacttaaaatatgttaatgaaacaaatatattcactcgctactctttgacctagggctaaggtctttttttaaagattgcttgcagttccatattgtcatttttgcatcatctataattttcagtcttaatttcttttaagttgggcaagaccttgtaaagaaatctgatgacagaatccatctagatctgtatttatagttgttttacctacatgtaatttaacagtaattatttttagaaactctttatcaaaactttctaaagcatattttacagagtgaaaagccttggatgagtggagggtggttaagagggtttctgccatgttctctcatgacatcattgatttcacccaaggttcattatttcacttcactagctggtatctctccaagtagcagttcccctggttacttcctctctctgtaaagaaaaattcagtgcaggcagtaacttgccagactttctgcttttagtttagtctccaatcaaacgcagtagaagtttcccatcataactgtttcgtgcctctgtgccagcattgtatactaaattaggaacatatctctcatttcttccatttggccagatagtttgttaatatctatttcatcaataatatgatttcttttcctcttatttaattctttttcgaatgcctctgtgtcctcattaccatctaggtgcatggattttcacacaggtgaggggtatttctttacctcctttccttacagatatttctctggaatacactaaatcccagtaattattatgagattgtatttaccaccttattctcaagttcccatgctctggcctgggcctatacaactaaaagacccttgagagtattactttgggaacattttccagttgttttctgtaggaatctcatggctcctctcccactattctttttcccatgacattactgcagacctttatgacaactggtttcatggttttatataagcattgctttctttactgtcctatactaagtttagagactgcttaatagtctccaagatgttcttgtcctcatgacatgtactccaaccctacccaaagtccattcctgcattacctaaaggcatcaaacagaaaatatcctattcaccacgtacctcttcatagttagctgttcactttcccaatattctctctttttcaaagtcctaaccattgagaggaagaagctacaagaacgccacctgtgtggctgggtcttctagtcttcagcttgtgacttcttagatgccaatgctgcttctctgtcttctagcagtgtggtcattcccataaagacccaagtactgaatcatggactagtgggcttagtatgtctcagcagactattataatctagaactagtcaccagaaagatggacaacaagcttgactgaccatatcttatctgcacagagcctttcactatcaccaatgagtggtgaccatcatccatcctctacctcccagggcagcagtgggtttcctttcactagtggtacttggatatcttctggatatgacttcttgatgctccatgtacacaaagacagcaatcagcaacgtccgtagaggtaattgtatagctgttgctgtacaatgtgtcagggacaaatgtagtgtatgatttttccatatgtctttttgcaagatcatcctatccatcttaccctgtttttgtgataagcttaaaatcctgagctttattttttccctttcggttgtactcttccatagtgaactatatactgttatatcacctcggtgtctagtgcagtgtgttagaaaacttagaacttaataaagatttttaagttaattcacataagctaaaattccacttatatgagcaaagattttgggagtcatttttaaaaattttatttatttattattattattatttgcttctctttgataaccttggtactaagatttttgggggtcatttttgaacaataatttgcagttgctgagttattagtctatgacttgctacattgcatttccttagcaagttgcaaatattcaagcagcaagatatgtggtcaacttctaaataatatggttgttgctgtttttttcctgtgtcattcagcattaacattatcctctgaaccccaaatacaacctctttgcttctatcaggaaaatagaaattcttctctaagaaatggcattggtgcattgggagactaaagttgcagtgatcggatgcctatattaatcccaaagagtcatcatttgaaaaattgaatttaagtctgaaataaaacatccataaaattgaactgtagtctcttttctttactttctcaggctaaaccccttgtttttccatttgttggccaatgaaggcttctcatggaactcattctgatcaaattttgtaactgaaaatattaggcttgctagttttagaagggttcttcacagacatctaaatcgaagtgtcttgacttgaggtcagggaatgggaagcagcagaattttatgtctactatgtttttctggtatccaaagctttcagcagatcattaaaggggcctatgacccaaagctaatcatttttatagacaaattataagaagagatatcactttccaaaacagcaaaatgctaagctctcattccgccactgatgttcttctctttgcctattactttttcctcttcttggaaagaataattgaggatttttatggaacatcctgattttcgagtcacttggaggtcccttttctcatattcgatgtcacaaaccatagggctggctgcgttgtcagtgcagagttacaaggtgagtgtgagactgctcctaccagccattgcctcagagctgagtgtggccagttaggtaggcacatcagcaggcagcgtccaggaggaacctgattcttttttttttttttttttttttgagacggagtctcgctctgtcgcccaggccggagtgcagtggggcaatctgggctcagtgcaagctccgcctcccgggttcacgccattctcctgcctcagcctcccaagtagctgggactacaggcgcccgccatcacgcccagctaatttttttgtatttttagtagagacggggtttcaccatgttagccaggatggtctcgatctcctgacctcgtgatccgccagcttcggcctcccagagtgctgggattacaggcgtgagccaccgcgccccgcggcatctgtcagtttcatttgtgttcttcctactatgctagagatgtggtccaaagctgtttttgtattttataacccacagattgcatctcttttaaattgaaaacaactaaatggactaaaaaagtataactttaatgcacacagcaagtggaaagatacggtacttaccaagttctttttctgatagtttattattgtgtttcttggcctgtataactttcattatgatctctatcagctccctgagaaattattcttcagatcaataatttgtgtgtatttgagtaaatgataactcaaagacttcaataaactttaaattgtctacttaatttgtttttttaaaaaactgtaggcacaattatgatactatgcattgtcttaaggtagtttctgttattgggttattaggtatgggaagttgagtcaagattactcagagagtcgcagaatgagtggccgaaaaatttgttacaaattagggcaaatatggtctcctctgtctgagcagctgatctgctactgaaccccggttgtagctgcatctctgagaatactgcagcaacatgaccacagacatcaatctgtgttattacttagcatgggacacagggaaacacttctgactggcatttagtaaacagagtaaaacaactatcattgtaaaatacatgtgttatgcttccccatctcacacccccaggtatctaaattcagatctatgggatctttcccaggtttttttttttttttttttgagacagggtcttgctttgttaaagcccaggctggagtgcagtggtgcgatcttagctaactgcagccttgatcccccaggctcaagtgaccttcccacctgagcctcctgagcagctgggactacaagcaggtgccaccatgcctggctagtttttgtattttttgtagagacagggtttttccatgttgctcaggctggtctcaaattcatgagctcaagcaatctacctgcctcggcctcctaaagtgctaggattataggtgtgaaccactgcacccggctctcccacattctttaaatgaaagtgttgacattttaggtgtttaactttcctaatttagggtgttcaattaggaaaagaggaagtcaaattgtccctgtttgcagatgacatgattgtatatctagaaaacccctaatttagaataagacttagagttgagagggaaaggattgccaaatagtttcaattgctttagtttactttccttaatttcttctgtcttcaaactcttctcctttctttttcctccttcttccatttgtcaaaactgtaagtgctttgggtactgtcctaagtgatgttcagagtcaatgcaatgtatatcaaattttcccataatgtgaactggaaaataattggaatataagaaaggatagactgacgtgtgtccggatgccttctctgttgtacctgtttgcggcacattgcccgcttaacccgctaggagatgtaggaagtcaacctgttcaacacatctcaagcagatcgaatgatgaaatgttgatgatttcaccataccttttccactaagaaatggaatgatcctcctcatatttttgcagcggttatctatttcatctattaactgagaatgcagagtgtgcctgagcatttttactcacagaactaatgaaaaaagttaaaaaatttttatgcaagtggtttgcttgactttcttgcaaaatgctcataggaagttaataggaatcatattattatcagaaggttttaagacaacactagttctccccctagcccactaccaaaatacactgtggtatactaatttacacaaattaggttactatatacttgttactatgctttcatcacaaaagtatttaaaaccaacacatcatagattgttttctttcctatattttaaagccactcaaagctgagtggtatgggagaagtctgtggtattatacaatttgaggaattcaaaaagttccacattactgccaggcctgctaaagtaatttggaggaatttatttactatcatgcttccttgctaccatttacaatcactgatttgttaaaactagatgttttgcagtggaagtggagattgtatttagcctctgaggtccagccacggttctgctggtgccggcaatccaggggttttggctcctggggtctcttgtcaacatcatctctgggtagccagttacccccaatgtcctttttcagggcacagggtgtctggccagaatccccacttagcccaggacctggccccttcacctattccctcttattctgcatctggagacattgccttctcactggttttgtctcatcccagaaacagtctaaagtctttcaaattcagaatcaccatctgcttattggatattttctcctgaagatattctgagacactcccggaaccagatatttgtcactgaaaattttaatttattccatattttccaaatgccataatggagtgtggagatacaaagatgaataggatttacccctacccaccagaggtgtgcaatctagtgtgggacacagcgctctaagtatggaatagtgatagcagctagcacctattgagccctgaccttggtaggtacggcagtaagcccttgacataacttactccttgtaatcctagccagttctgtaggtatcagtatctccatttcctaaatgaggaaagcaaagcacaggaaagttagataacttgcccacagtttttctggtgacaagtggcaaagcagagacttaaaaccaggcaatccaggggctttaagtgattcttaaatattaagtgataaatgcatttaaaatgtgtccggaatgggctttgtgaattccagaaagggaactaaattctgcttaaaaagagaaggcttctcaaagggagtaatgtttgacttgagacccagagaaggagaaaggaaggaagcttgcagaggagccttggtgacaagaggcatgctctattgtggggacagtaggaataggggagaagccttggccttgtcactttctgctttttggtttatgcagttgtctctgcctaagatttttttctacctttgtttctgcctccagttactccccctggaagtgtcactctcttttaaattcagagagccttgtttatggcactgatgtggtgcccagtgcattctgctttgtactaaatatgctgtatctcacctttgtgtcagcaccaaactgtgttctttataattctgcagcttctagtacatttgtgcatagtagcaactcaatgcacatttgttgaatgttgaatgaatgctagtcaaggcaagacaagcaaaattctcaaataagtcaaaataatccctaattatttccagatggaatggtaatcaatttgcttcaggaataaattagccaatggatgtttgataacataaccgaccctaagtaactcgatttagctgctgaagccagcttttaaagatgcagtttatccactggccatgggatatcggccatgattactggagcaagccctagtaatacaatctttatataataaatataatcttactaaatgtcagtgagaattatctttatataataaatacagtctttaaaattgtatttatatttggcatttatgcctctcagcactatgtaatttcttattagaagtacactttaacttgagaattccattagaatcattaaattttctgaatagaaagcttaacagtgtttaaaaataaatttttagtggcttcatgatgtcaaaacaatcacttgaaagctgaaaaatatgttaaacctacttttgtatttatgtcccagtttgcttttttcaattcacaaaaaaagatttgacttgattacaaagaagaaaacacagaaagagcaaaaaagaaaagaaagatgaaaggaaggaagaaagggagacaaaaaaagaaacaaaaagaaaaaaagagaaagactgattatctagttgttttgtgattaggtagacataactcgagaatcttggagccatccttatctcttccctctccattacctgccacaaacaaccccccactaaatagtaaattcttactccaaaatgtctttgatattccttctttcttattcatttccatgtcactgcctgacttcaagcttttatgaagcttgaagttatatatcaaattgtaactgatctcctaattctcattttgtgtgtgcattccccaaatcattcttgacatatctgtgcaaatctcagcatgtcactttcccagtagtaggtatccatcagctccctgttaatctccatgaccagagattctgtccacctctccagcctcatcttgtgagcttctttccaatcacctcatcctttgcctccttagcttttgcctcggctggcctgataaacctctacctgcctgccaagtttcagttcaagccttagctctctgtcaagctcccgcagtccctcacccggactcacatgctccttgcacctgcagtgggtcagctgctttacatatattgtactctttacttctcacgtagctgtttaaggtgggtggtctttgtctccactttgcaggtgagaaaagtgaagctcagagagcttaagtaatttgctgacagtcacacagtaagaaaatcagtggcaaactgaaatacaaagaacctgagctcactcctcaacatgttgctccttggctttagctttgcccacacctgcttttattttgttacgacgtttgtcacatttactgtgtttgcaattctccatttctgctacactcgttgaaagcatcagccccacctttcatctttatgtctccaaagacctgcacagtgtctggctcatgagaggtagttaagaaatatttattaaggtgatgaatgaaccaagcaatatacaaacaatatacatattcttttctttgtggtggtgtggagaagaaagggagaagtaataagttccactttctggagtggaagggttctagtgggacaatagaagattgtatgacctccagaaccatcttaagagtgattttaggattagctactaagggccaggcacaatggcacacacctatagtcccagctagttagaggctgaggcaggagcattgcttgaacccagaagttaaaggttgtagtacactgtgattgcatctatgaatagccactgcactccacctgggcaacatagcaagaacctgtctctcaaaaaaaaaaaaaaaaaaaaaaagaatccagctattaacagaagtcagcaatgaataccaaggtcctcagtattacataatatttattgcttccttggatgaacttattaatttcttataaagaaatgcgcccgtataaggaagaaaggagcataggaggaaagggataggatggagaagagtcttgtagtgtgacttcatataagtccctcagtttctttacttgaaaacatctttatattaatcatggggatgagttttattaatgtggggtagtgggctgaagaatgctccccaaagatgtcaggtcctaatccctggaacttgtaaatgttaccttatttggaaaaaagtgtctttgaggatgtgattaagttaaagaacttgagattaggggattaaatgcaatcacatatatctttataagagaaaagcagagggaggttacacacacacacgcacacacacacgcacgcacgcagtgtgaagactgaagcaatatggagtgatgcagccacaagcccaggagtcccagtagctaccaaagctggaataggcaaggagtggagcctctgaagggaatggccctgccagagggcaggtgggcctgctaactccttgatttcatcccagtgatactgacttagacttctagcctccaggactgcagaggaagtttctgttctttttaagcaatgaagtttatggtaatttcgtatagcagtggcagaaaactcaccaggaggcaacaatacaggaacatgagaaatatgaggcctgacagagagctcctttggatggctgttcctccccacttcccttggaaagcttgctccttcactctccaggggatcaaaacctgggagactgtctgctgctgaaactacactcccggaatctgtgagttctcctgttgttctttttccctcaggatcctccattgccagcatctatcatagtccaagcagagcacataagcactcttttggagtacatatggctttcatggtctggtgatggaatctgggaacacagttatatttggatgaggtcagttctgagtggcaagctcatgttacttaattagtttagcataagtgtaaacctttcaatagacgcttagtttcccctgtttttttttttttttcatctatcacaaaaataggttgggttagatatagctgtggttcgtcagctctgaaatcctgcaactctctcactagtctgcatttgccttcacctgtgagcctgtctcccgtttgtcccagggaaactcttctaacatgaaatccaagttgagctctctcagctatgtaggttcctggaaaaggattggttttcattctggattttaagtcaaaacttaaaaaaaaaaaaaccctaactcttgacttagttggtgtccctagattcagaccttgaaatttacccaactaggctttctttttcccaggtacctatgttgtactcagaactgtgaacaaagcttgatcaagccagtctgaatttttgcaaattttcatcccccttttattttcacatttaaaaaaatatatatatttctatgtattaaatgttgcttgctttagaccttccaagctcaatcagatcaacgttagattattgcccctttcttttatttgctggatcttattatttttaagacagggtctcactctatcaccctggctggagggcagtggcacaatcatggcccactgcagcctcaacctcctgggctcaagtgatcttcgcaccttggccttctgagtagctgggactacaggtgcttgccactgtgcccagcttttttatttttattttttgtatagacagggtctcactgcattgcccaggctggtctcgaactgctgggactcaagtgattctcccacctcagcctcccaaagtgctgggtgaaccacgattcccagcctcggatcttattttttatttccctctgaaaatctctacctcacagacagaagctttgattgtatgacagctgtaatatgtgacatttgctaaaacttaaaaaaaaaatgtctgctattaaatgatggtctaaaaataaatttcaaattgattttcctttttttgagacagattcttgctctgttacccaagccggagtgcagtggtgtgatcacggctcattgcagccttgagctccccggcttaagcgatcctcctgtctcagcctcctgggtagctggcactgcaggtgcatgccaccatgcccggctaatttttatttatttatttatttattttttgagatggattctctctgtctcccatgctggagtgcagtggcatgatcttggctcactgcaaccgctgcctcccagattcaagcgattctcctgcctcagcctcctaagtatctgggactacagtcatgcgccaccatgcccggctaacttgtgtatttttagtagagacagggttttaccatattggccaggctggtctcaaactcctgacctcgtgatccacccgcctcagcctcccaaagtgctgggattacaggcgtgagccactgctagtggccatttatttatttttgtagagatggagtcttactgtgttgtccaggctggtcttgaactcctggcctcaagtgatcctcctaccttggcctcccaaagtgctgcgattacaggtgtgagcccctgagccaggtcaatttcaactcttattttggattcaaggggtagatgtgcaggtttgttacatggtatattgcataatactgagatttggggtacaattgatcccatcacccagagagtaaacatagtatccaatagtttttttaacacttgccctcctcccttccttctccctctagtagtttccaatgtctattgttgccatctttatgtccatgagtactcaatgtttacttcccacttataagtaagaatatgtggtatttggttttctgttcctgcattaattcgcttaggataatggcttctagctgcaattatgttgctgcaaaggacataattttgttactttttatggctgcatagtattccatagtgtatatgtaccacattttatccaatccactgttgatgggcacctaggttgattccattcttttattgcctctttcttgaacccatgatttcccatatgcattctgagatccctcacagctctcatcttcctcttccaacttccagtaaaggttcggtatgttcctgcttcacacaatgtcagggaggtcagttggttctcagacccccatcattgtgaaccagcattggcattcaccagaatacttggaacacaactttcttatgaaacattctttgagtagctgctataaaccaggcatttctatagcgagtgttgaaacttatgttagactgtataagattcaattcttgttttaaaatgtcattgtaatagagaaagtaagataaccacacaaataataataagatgaagtgggtgctgctgtaatattgatggaaatagccgcagatacaaaagttgataaaactacatttcatttcctaacaaggcatttgccatggatgtgaacttatgaacatcagttttcttacatgcccaggggtctatggaggccttatttgtgtatgaagatgtggtgtggagtaaatgatataaatgcatgtgaaagtgcccagcactatccctgattcatagtaggggattggtcagagattcttaaataccagagaaggggtttaaaaggaagaagagatcacaggtggtttggcagatccaaaagggctttgcggaaaatgtagcaattaagataggtcagactggtggctcctcagggcagggaccttctgaattacttttcctgtccttagtattttataaatagactgtagtggatatatgttgagtgaatggaccttaaaggatggacaggattctgaaaggttgaactggactttgagaaagggcactgcagcaggggcatagcagggatggtaaggtgtaggtcatgctgtcagaatggcagtctactttggtgggagtgtagggaagtagtagaagtaagagtgaaatgtaagttgggaatattctgtgagtattgaaagtgctttcattgttagactgagagcttgcactttatctaattactctttaatttttgtgtctctagtcaaatttaggaggaggagatttttgttatgctttctgcattattgagagtttaccattataattgccatctgtcgtgtttctcttttttgtcagaagggttgtaggcaatctttggctgggataaacagatagtttttctactcactaaagaaaatagatgcagagagactggcactaacaaggaatagagaaggagatagttttttctttgcttatgcctaaatcttgtctttgttaaatattatgttatacattattcataacttttaagcttttaaaaaatcaaaatttaagtcaaataagtcaaatatacaaaagaaaagaatatgtgagcctatgactttccatgtgttctagaccaggagttcccaaccgccaggccatggaccagtaccgtctgtggccagttaggaaccaggcctcatagcaggaggtgagcagcagatgagcaagcgaagcttcatctgtatttacagccgctccccattacttgcattaccacctgagctccacctcctgtcaggtcagcggcagcattagattcttataggagcacgaactctactgtgaactgtgcatgcaggggatctaagttcatgatccttatgagaatctaactaatgtctgacaatctatcattgtctcccatcacccccagatgggaccgtctagttgcaggaaaacaagctcagggcttccactaattgtacattatggtgagttgcaaaattacttcattatatattacaatgtaataataatagaaataaagtacacaataagtgtaatacacttgaatcatcccaaaaccatctgccaccccaaccctggtccatggaaaaattgtcttctatgaaacttgttcctggtgccaagaggttggggaccactattctagatcatctcaaggaacatttttacagcttgaaccagccttgtacataactcgttttataattagatgctatgtttcaaatattagtagccctgggaggggtaacactaatattcagaaatagctgggcagtatatgagatatctggaggaagggagaacatggagagggtgctaaagacaaacttgactatagtatttgatgtgaacatgacctcagttgaaagtacaccactattttatgtacctttaagaaaaaagtgctgtcaatgatgtttaatgattgtgctgcgctacacatgagttggtcatactggcttcttattgctttgacatttcctgcctttcttctgggatatttggcacttttgcctgccttcttgtatggcttggcataagatagacaattctttgcacatgtctgtgtagcaaaatgcaactcaacttcatttaccttttgttatagatcctgtaagacaactgattgctgtttgcaataaaatacagaattgtggtcattcttccaaagaaaaatatgtattccactaatatcaaatttatcctccaacttcatttctatgcttttctacttatacaataactttttgtttcaatgttgagttacatgtaaagacatataaaatggaaatgaaatttaacactataagtaaatcttagctaaagcgacaataatattaatgtgtatgaccaagattgtacacgtgcaactacatcatgatagcaactagtggaagccagttataagactgcattgattaaagacatactcacaatatagagaggttaaaatgagggctgggtgcggtggctcacgcctgtaatcccagcactttgggaggccgaggtgggtggatcacctgaggtcaggagttcgagaccagcctggccaacatggtgaaaccccgtctctactaaaaatataaaaactagccgggtagggtagtgggtgccagtaatcccagctacttgagaggctgaggcaggagaattgcttgaacccagaagatggaggttgcagtgagccgacacagtgccactgcactccagcctgggtgacagagtgagactcagtctcaaaaaaaaaaaaaaaaaaaaaagaagaagaaaaagtgcacttagaaacaatgaaacacgctctttttaaaatgtgcctgcagactcatctacctcatgctgaagtattttatctagcacttaagactaattggttgaaccacatccctttatggctctggttttatgatgtacactaatgtgtcataaaaccataatgtacatttggtgaccacaatcatcttatcaaagggctctgctggaagtgaggctgatgcatgagcatccataccttaagctctgttttccaagttggtggttgtatgattatatatagaagcgtcatggtcatatttgcccttgctcccttctacccactacgtgtaccagttaggagtttatttaatgggtgtcttatgattttcttgtctggtttacctcttgatggtccacatttcataaatcatatctcctcatatatacaggaaagcatatgttgaaatcactgaaattacataacttgcccccctttgaatcagtttccttcttatcactttgaacatgctcatttcaggcatctctacgctacggagtgtgccctacaaatagaaatgtgggaaacctgccaggagaaattaaactgtcagtctcctcctcttccagatgagggttgatagatacatctctctatgttgtggcagccttcaatctgaattgagcagatttcaaacatttctctcagctgtgtacctagagtttaatctctgaagacttatttcattgccgatcatttgcaaaatggatagatttgagtcgtaccctatccatttttctcctgtcacttactggtaaaataaacactgagtaggaagttgtgaaagaggataaaggaaagctcggcaaactggatggtcctgaaaagtctgtaagagacacatggaaggtaaacaagctggttgcttttgttctgccagctgaggtcattggagcatgaacagggaaacttcaacttggagctgatgtcctgatcctttggaagctcttttgggatggaagggttctcgattcctgtttttggtcttactcttgttactgtctaagagggctgtctctgttctaatctgctagttgcaggcttacagttggttagatgatgaaatgtgatgtttacagcatcaagcacaatgttcagtagaagttttgacaaatcctcctgctagaacttcatgataatttgatctatcagatacattttaacaacccttttgaccacacgttagtggagctgatgcaattagctagttcttgttttattgttacattaagaaaaaaaccaaaatttaaatttaaatatacaactcatgtggtggaggaaaaaagacatactttcagagggaaaatcttacaagtgagttttatgcttaaaaactgaatgccttaaaatttatatatcttcttttttggaggtgaaaaaaatcttctaggaagttgctatttataaaaaaaaagtggcatagaccttcctttcaaactttagaaaaaactagacttattaaatctcacatggtcaaaggacaacaccatttagaagcatttaaaacattatgattttggggtacttgaacatttgaataggaataaaagcaatttttttagatggcctgaattgtttttttaagattgggtttttggtgtgataaaaatattttatttcatgattgtgtggtagttgtacaattataaatacgtgtcaaactcattgaattttactcttaaacttggtgaaatttttgtctgtaaattatactttaataacactgacaagaaaaataaagtattttgggatttagaaaaggactggctgggatttcaaggaagggagtttctgtggacacgcaatatgacaccaaaatcatggataggaacagaaattattttaatcaaaagccaaatgtaatgaaactattaagaaaaatgatttagtgactgtattttacatgtttattatacttctcattacattggggttatttccccacttacattcatttgtatgtgtgcaggtagagtagggtggggacaaggggatgggagagtgggtgtgcatcacgtgaaaatgaagaggacttggggcagagcaagatggcctaatagaagcctccagcgattttcctccctgcaggaacaccaaattgtacaactattcacacagaaaatcacctttataagaaccaaaaatcaggtgatcacagtacctagttttaacttcctatcactgaaagaggcaccaaagagggtgggagaggcagtcttgaattgcctataccacccagtcttccattccctggcagtggtcgcatggcacagagacagaatctgtatgcttgggggagggagagcacaggaactttgcactggaactcagtgctgccctgtcacagtggaaagcaatgccaggaagaactcagctggcacccatggagggagtatttaaacaagccctagccagaggggaatcacgcatcccagtggtcagaacctgagtgctggcaagctaaagtactttggggtcctaaatacacttgaaaggcagtctagaccacaaagactgtaattcctaggcaagtcctggtgctgtgctggccttggagccagtggagttgggggacatgtgacccagtaacacaccagctggggtggccaagggagtgcttgcatcaccattcccctaaccccaggctgcacagcttgcatctcctggaaagactccttccttctgcttcaggagagggaagagtaaagaggactttgtctcacaccttggataccagctcagccacagtagaataggggaccaggcaaagtcctgaggcccccattccagcccctagttcccaaaggacatttctaaacacaccctgtgccagaagggaacttgctaccttgaagggaaggccccagttctggctggattcatcacctgctggctaaagagcccttgggtctcgaataaacatcagcagtacccaggcagtacttgccatgggcattgagtgagactcagagctgtgctggattcaggtgagacccagtacattcccagctgtgggggccacagagagagactcttctgcttgtggaaaggagagggaagagtgtaaaagatttggtcttgtggcttgggtgccagctcagctgcagtagaatagagcaccaggtagattcctaaggtttctgactctaggtcctggctccaggatggcatctctagacctgctcagggcctggggggaactcaccattctgaaaataaggacacaagccaagctcatcttgctatctgctaattgtagggccctaaggccttgagcaaacataggtcgtaggcaggcagtggttatcacaggccttgggtgagtcctagtgctgtgcctggcttccggtctgaccaagtatagtcccagtggtggtggtcactgggtgcttgtgtcaccccttccccagctccaggcagctcaacacagagaaagagactccatttgttttggagaaagcaggggacgagaacaagactctgcctggtaatccaggaaatttttctggatcttatccaagaccaccaaggtggtatctctatgaatctacaagagccacagcattacctaatgcagatatggcagaagtgaccaaaaacttagactacaacacttaagtccctttgaatacctggaaagccttcctaagaaagaagggtacaaacaagcccagactgagaacatgacaataaatacctaactcttcaatgcccagacactgatgaacatccacaagcatcaagaccatccaggaaaacttgacctcaccaaagctaagtaagacaccagggaccaatcttggagagacagagatatttgacctttcagacagagaattaaaaatagctgttttgaggaaattcaacaaaattcaagataacacagaggaggaattcagaatcctatcagataaatttaacaaagatatttaaataagtaaaaagaattaagcagaaattctggagttgaaaaatgtaatcgacatactgaagaatgcatcaaagtcccttaataacagaattgatcaagcaggagaaagaattagcgaacttgaagacaggctgtttgaaaatacacaatcagaggagatcaaagaaaaaagaatgaagcatgcctagaagatctagaaaatagcctcaaaagggcaagtctgagttattggccttaaagaggaggtagacagacagataggggtagaaagtttattcaaaggaataataaggctttccaaacctcaagaaatatataaatattcaagtacaagaaggttatagaacacctaacttgggttataggtttaacccaaataatactatctcaagacatccaataattaaactctgatagtcaaggataaagaaaggatcctaaaagaagcaagagaaaagaaacaaataacatacaacagaggctgggtgtggtggctcatgtctgtaatcccagcactctgggaggccaaggtggacagatcacttgaggtcaggagttcaagaccagcctggccaacatggtgaagccccgtctctacgaaacacacaaaaattagctgggcttggtagtgcatgcctgtaaccccaactactctggagtctgagacaggagaatcacttgaacccgggaggtggaggttgcagtgagcagagattgcaccactgcactccagcctgggcgatagagtgagtctcgtcttaaaaacaaaaacaaacagacaaataaaaaacatacgatggagctccaatatgtctggcagcagacttcttagtggaaaccttgtaggccagaagaaagtagcatgacatatttcaagtaccgaaggaaaaaaaaaataccttgtatcctagaatagtatatccagcaaaaatacccttcaaacatgaaagataaataagaactttcttagacaagctaaaggattacatcaatgccagacctgtcctaccagaaatgctaaagggagtccttcaatctgaaagtaaagggcgttaatgagcaagaataaagcattgggaggttcaaaactcactagttacagtaagtacacagaaaaagccagaatattataacactgtaattgtggtgtgtaaactactcacgtcttgagtagaaagactaaaagatggactgatcaaaaataataactacaagttttcaacacatagacaatacaataagctataaatataacaacagaaagttaaaaagtggattaacagaaagttaaaaaaatgaagttaatgtatagagtttttttttgttttctctttgcttatttgtttatgcaatcagtgttaagttgtcatcagtttaaaataatgggttataagatattatttgcaagcctcatggtagcctcaaataaaaaaatcatataacaaacaaaaaaataaaaataaagaaattaaaaacaccactggagaaaaatcatcttcactaataaaatgacaggaaggcagaaaagaaggaagagaagaccaaaaagcaatcagaaaactaataacaaaatagcaggagtaagcccttacttatcaataataacattgaatgtaagtgaactaaactctccaatcaaaagacatagaatggctgaatggataaaacacaagacccaatgattggttgcctataggaaatacacttcacctataatgacacacataggctgaaaataaagggatggaaaaagatgttccatacaaatgaaaaccaaaaaagagcaggagtaaactatacctatatcagataaaatagatttcaaaataaaaactataaaaagagacaaaaggggtcattttagaatgataaaggggtcaattcagcaagaggttataacaattgtaaatatatatgcacccaacactagagcacccagatattataataagcagctaataacaagcaaattaataataaagattggagcagaaataaatgaaatggaaatgaaaaaacaatacaaaagatcaatgaaacaaaaagtggggtttttgaaaagataagtaaaattgacaaactttagtcagactaagaaaaaaagacaagacccaaataaaattagacctgaaaatggaaacattacaaccaatgctgcagaaattcaaaggattattagtggccactatggctaactatatgtcaataagttggaaaacctaagagaaatggataattcctggatacctacaacctaccaatattgaatcatgaagaaattcaaaacttgaacagaccaataacaagtaatgagatcaaagctgtaataaatatatagcaaagaaaagcccagggcctgatagcttcactgctgtattttaccaaacatttaaagaactaataccaatcctacccaaactattctgaaaaacaaaggagaagcaaatagttccaaatcattcaatgaggccagtattacctgacaccaaaaacaaagacacatcaaaaaaagaaaactacaggccaatattgttgatggatgttgatgcaaaaatcgtcaacaaaatactagtaaattgaattcaacaaaacattaaaaagatcatttatcgtgatgaagtgggatttatcccagggatgcaaggatgattccatatatgtaaatcaatcaatgtgatacatcatatcaacagaattaaggacaaaaaccatatgatcatttcaattgatgctgaaaagcatttgataaaattcgacatccctttgtgacaaaagccctcaaaaactgggtataaaagagacatacctcaacaccataaaagccatatatgacaggtccacatgaaatcctttcctctaagatctgaaacacaacaaggacacccacttcataactgttactcaacatagtactggacatcccagctagagcaatcagacaagagaaagaaataaaaggcacctaaactggaaaggaagacatcaaattattcttgtttgtagatgacatgatcttatctttagaaaaatatgaagactctaccaaaaaaaaaaaaaactattagaactgataaacaaattcagtaaagttgcaggatacaaaatcaatatacaaaaatcagtagcatttctatatgccagcagtgaacaatctgaaaatgaaatcaagaaagtaatcccacttataatagatgctaataaaattaaatacctagaaattaaccaaaagaagtgaaagatctctacaatgataactataaaacactgatgaaagaaattgcagatggcacacacaaaaaggaaagatattccatgttcatgggttggaattattaatattgttaaaatatccataccacccaacccaaagcaatctacagattcaatgcaatccttatcaaaataccaatgacattcttcacagaaatagaaaagacaatcctaaaatttatatggaaccacaaaagacccaggatagccaaagctatcatgaacaaaaagaacaaaactggaggaatcacattacctgacttcaaattgtagtacagagctatagtaaccaaaacagcatggtgttggcataaaaccaaacacatacaccaatggaacagaatagagaacccagaataaatctatatatctacagtgaacttatatcccacaaaggtaacaagagcatactttggagaagggacagtctcttcagtaaatggtgctaggaaagctggaggtccatacgcagaagaatgaaactagacccctacctcttgccatatacaaaaaccaaatcaaaatagattaaagacttaaatctaagatgtcaaagtatgaaactactaaaataaaacattagggaaactctctaggacattggacggagcaaaggtttcttgagtaatgtcccataagcatgggcaacaaaagcaaaaatggacaaatgggatcccatcaagttagaaggcttctgcacagcaaatgaaacaatcaacaaagtgaagagacaactgacagaatgggagaaaatatttgcaaactatccatctgacaggggctgataaccagaatgtataagaagcttaaacaactctataagaaacaatctaagttaaatcaggcgtgatttaactcacgtctgtaatcccagcagtttgggaggccgaaacaggtggatcacctgaggtcaggagttcgagaccagccagacccacatggtgaaaccctgtctctactaaaaatacaaaaatcagctgggtgtcatggcaggtgcctgtaatcccagctacttgggaggctgaggcaggagaatcacttgaacctaggaggcagaggttgcagtaagctgagattgtgccattgcactgcagcctgggtgaaagagtgagactccaactcaaaacaacaaaacaaacaaacaaaaacaaaaaaacaaaacaaaagggacaaaagatctgaatagatatttctcaaaagaagacaaccaaatagcagacaggtacatgaaaaggtgcccaaagtgagacctttgtatgttctcacttgtttgtgggagctaaaaattaaaacaattgaactcacggaggtagagagtagaacagtagttaccagaggctggaaagagtagtgggtgaggtgaagggggttgattaataggtaaaaaaatgtagttagatagaatgaataagatctagtatttgatagtataacagggagactacagtcaacaataatttattgtacatttaaaaataactaagtataaatggattgtttgtaacacaaagaaaggataaatgcttgatgtgatggctaccctatttatactgatgtgattattacacattttatgccttatcaaaatatgtcatgtatcccataaatacatatacctactatggacccacaaaaattaaaaattaaaaaaaatgaaggagatgtgaaaggtaattggtgagggtgtagttgtggggagagtaattccttctactctcatcaacttaattatgtgcgtgtaattcacatttgtatttcaaaggacttgtgtgttataatataatacaaaaagcatttgcttttatagagaaacagataagccccaattggtattattgatattattatacaattactgcttctttaaagttgagcctacgtgctgaaaataaccagagcacagaatcatagtttagctaaattgccttattagaaccatttgaatgttcctgaaaataatggcagaattgatgctaatttggaggttactattgattgactgctcctcttgaaattattgaattgataatgctgtgctttggcagctgatggccacccatttgccttgattgttacatactaacttaatgatatgtactagttttagttgggcaaatattgtgtgctttctaagcagcctattactttgtactgtttctttggagaaaatttctttcttatccactcaaaaatgaaatatgtcttaaaagcacagccctttgtaaagacggaaggaaaaatttgtatctatgggcctactacccagtgataatcacttatcattttggtatattttcttccagtctttcttctctgctcagctggttctgtttcttttacttttttgtgatcgctgtctctataaaagtctgtattcacttttttgttgttttcgcttaccttaggatgtctttttatatgttagatatgttttacaaattttttttttgagacagagtttcacccttgttgcccaggctggagtgcaatggcgcaatctcggctcagtgccacctccgcctcccgggttcaagtgattctcctgcctcagtctcccaagtagttgggattacagccatgtgccaccacgcccggctaattttttttttttttttttgagacagagccttgctctgtcacccaggctggagtgcagtggtgcaatattggctcactgcaacctctgcctccctgattcaagcgattctcctgcctcagcctcctgagtagctgggactacaggcgcctgccaccacacccggctaattttgtatttttagtagagacggggtttcaccatgctggtcaggtctcgaactcctgacctcaggtgatccacctgccttggccttccaaggtgcttggattacaggcgtgagccaccgtgcctgcctacaaatatatttttaatggttgcattcattttaaaatatagaatgccttacttccctgagtttaccattttcttgtatttcattatacataattagatcagaaaatacatttctttttggtaggagaaaattattgtttgcttcgacttttataattttaaagcagttgatagactaccaaatttaataataattaagatatttaataaatattgcatgttcttactcatgtggaagcttaaaaaagttcatctcatagaagtggagagtagagtagtggttactaatagtggttagaagctgggaagggtgaagggaatagggagaggttggttaaaggatgtcaaattataaccaggaagaataaattctggtgttctatagcactgtagggtgagtatagttaacaataatttgttatttattttcaaatagctagaagagaggattttttaatgttcccaacacaaagaaatgataaatgtttgaggtgatgagtatggtaattaccctgatttgatcattacacattgcaaatatcaaaatatcacactctgtatcccataaatctgtacaaccattgtgtcaattattatgtcttatgatcgcttcaaatagccataaacgttaattggttgtatttcatatctttccgataatttagtcatgggctctgagtttctttcttaagatgagagccttgattttccatttttacacgtcttgtaggtttcctcctcctcaatgtcctccagttggaggctcaaacccacttcctctttaaagtttgctgcatttcctgtccattcatttccctgactttggtgtcaggtcttatttatttaaaattataacaactataagttttttctttctatccctgggtaatgaattgcaacaagacttttcatccccaacacctccccctcccccagcccctgaaaaaaggaaatttcttctgcttgaaggtacttttgattgcctgtgattaaaaacaatttttttttgttatctggagattattaaagagccaatgactcatagaaggcattgtatatttacgtatatattatactcattacctaggatgtttacagaatttcccccttgggagttaatatgcagctgcgttttattcctcacctgttaccattaccctaatagagacaagtccaaagtaccacggaaacccttcaggagaaacagcaaaacagatgacaaagcagctcatttcttttcttcttaatggtctctttttttaaaattatttccaaagcaaatttgagtgtgttttgattttccaggaagtaaataacttctgatattaagaccgtttaaacgtggttattttcccctttgcactgaatcggattaagccaaccaagtattttgtgccatataaacatggtcttaatctaaatattcacctcaaaactttctttgtaaacatgtagttttgatgccttggcttccagcagaatggtaagcttcacatgggatttggagaaaaggaatcaaacactccagcgctccctttgggaactccttccctggaatccaaggctgcttcaggcaggtcaccttgattcacctataggtcaggacaggccagtttgtaccagatatttacatgcttaaattactgatctttttttgtttgtttgttttcaatgtgtctcacactaaatcactgcatagctaaacatattactttaggatgagtctttctgacaacttaaaatttatttgtagtctttctggttctctaatgaaggaataataaactcacagtatgtaagaaaaagaatagttttggaatggagttttctaaagaattttagaggtttttttttacaagtttaaatgttggtgtaaatgttccatttgtgtggcaaattaattttccatgtgcattccctttattccaatggtggaggatgttgggagggtggacagggaaaatacactcactatacagctaatatcaattctgtgcctgctactgaccactctaggctctcaggaacaaagatgagcaatgcactttcaatgagctgctatactggagagagagggcatgtaaataaatcactatattacattatggtgtagacattggagaaatgggggttcaggtaaaagactgggtaaatatagaaaagggaacaattaattctgaccaaggcgttaggtaaggagaattcaggagaagcttcaaggtagacttgcaatttgactttgcagatgaataggaatttatctgggtctataggttctaggaagggtgaacagtacaggcagttataatgtgctatgcttaaccactgtggggaacgtgccatagccagcatatacaacgctctgtggatagaggagaagctggacaggtgggttgggaccaacttgagaagagcctggaagaacccaaggtggcttttatcaggggaaggacctgatcagttatgtgttttctaatgttacctttgccgtgatgtgaagagtgggtttgaaaggggagcagttagaggcaaagttaggagctcattgcagtcattatttttgtaagagacgagggcctgaaccagtcgttggtggcaagattgcttttgagagagatccccaaagcccaaagggcagggtttgctgactgtggcacctagaggaggagatccaaaaggatgattctgaggtttctactgcaggcacccaggtgatggtgaatctgttaaccgagacaggggagcaaattcgaagtgcctgtcaggactttcacaaggagttattcagcaggagacatttggaaatatgcggcagggatccaggagaggttgggacagcaaacacacatgtaggagtcattgggttgtacaggcagttcagtggggttgcgtttttaagggaaagagtgactgattaagaagtggatagaggtgatgaatctgagaacaatggattcagggtattgtttcaagaggtttgatggttaagggtaaaaaagagggcagttgcctgagaggtagatgagtaattttcttttctgggacttgaatgcatgtgtgggtgaaaactagtggtgaggaagacaatggcaatccgagaaaaaggagataattaatgtagtgagtttggacgaaaaatattgggggggtcttccttttgaggtggacaggaggaggaaagtatagtagatgatgagatgaacttagaggtggatagaagagaaatgaaacttattatatctccatttgcttaaaagaggaagtctgagtaaagggagggtggagaagggagtttaaggatacttttgaagatgtgagagctgctttgaaaagtggaagagaccggccgggcagggtggctcacgcctgtaatcccagcactttgggaggccgaggcgggcggatcacgaggtcagatcaagaccttcctggctaacatggtgaaaccccgtctctactaaaaaaaaaaaaaaaaaaaaaaaattagccgggcgtggtggcgggtgtctgtagtcccagctactcgggaggctgaggcagaatggcatgaacccgggaggtggagcttgcaatgagctgagatcgcgccactgcactccagcctgggcgacagagtgagacttcatctcaaagaaaaaaaaaaaaaaaagtggaagagatagtcatggggataagaaaaagtttgctgaacagcaatgagtccagcccaggctggggctcatttgtctgcagcggagccaagcgcacagcatagcagtgttttctgtactgctgggaagcctgcaataagcagccgggaaaatgggcaggtgggttgatccgtggctagatattggctgggcagattttgaagaaagattttcttagggataggaaaatcaaagatattcttgactggtgttagtgaatcaactatgagtcctggagatcaaggataagtagtgaaggaagtaaaacttggaggggttctagggttagggaaatcgggaggggcaagagcttggaaggctgaaggagatgaatagtagaataagcaggtttaaacgagaaaagaaaaaggaaataatgttatggatcaggcatagtattttcatacatatctagtttatcaattcataagtcattccttcaataacaaaaatatttatttttgtcttattataaatataaaatatctttattttgttatattaaatggaacaaacacttttcagtcttatcctggaaattgaatattttacttaaaaaaaacccctcattttaaaactttggccaagttgtatatggtttatttggagacacacacacacataattattcaaggggaataaagggaagttaatgaattggatttttttgctcatagctaatttattccccatctactgtggtagtaaaataaaaattaaatatttacagttagcctatcattgtcatgtacctgttacaattaaataaagtgaaaatttaaaatgtaagctgaagttaagtttccaacctaagtttcttttagcattacatgtaaataatgtatttacctattacaactttctttttcccctcattaccattttttcgttcccctacatcgatatctctgttacaaagcaatggtatctatttatactatgcagatcagcttcaatgatgtgaagagctcacagaaataataatagacacatttatttgcatattatgtttctgcttctgcaagtaatattctttcttataatgcttgtatcttttatttggagagcttcaagtgatctggaagaatcccattgtattccataaaggagagtagatgagcagatggcttccacatctgcaaaatgggaatgttcgtggacttctgaaactatattgaaatttcagaattctctgtggcagttatataatatgctccttgaaacaacagcatattcaggaatggactagaatccaggccttttgccaacaagccattctttaatcctactgaggtcattattttctctatttcctaaagtcaacaacctgacattaaggaagcctttgctatgcaggtttctttcaacctatgtctctctgtctctgtctctttctctttcccttttatatctgttattcaaattacatttatgtgtagttacacattagttgttctctcttacctccattctaagttccttcactagatttcaaaaatcgcttaccacatcaaatacagccgaggccatccatccttcaagctacccatcatcagagccataccttatatattattctattcctctccatcacaacaaaacaaaggaaaactgatcaagtgccctcagcattctggaatacaatctcccccatcaccccagaagtactaaaccatcttactattctttagagggctttgaagtgggtactttgataccagtgagcacgtatgttggtgcaactaacttctccagaacaagagccttctccctctgcgattgtacagatccaggcatcttgctaatgcttacaaatgtcagatttattcttcattacaatgctattgaatataacaaactggcctcatcgtaagaatctcctggaggaagatattgaaaacacagtttctctgacttccctcatatagattctgattgagtaggtctgaggtagggaatggaattttctactttttatcaggcaactcaggagaatcttatgaccagtaagacaaaggaaacactgagattggtgatttttatccctattttaagatgaagacatgaaaggttttctagagacatactgctcaatatggtaaccattagccacacgtggctattaaaatgaaagttaatgggctgggcacagtggctcacgcctgtaatcccagcacttggggaggccaaggcaggcggatcacgagatcaggagatcaagaccatcctggctaacatggtgaaaacccgtctctactaaaagtacaaaaaattagctgggcatggtggcgggtgcctgtagtcccaactactcaggaggctgaggcaggagaatcatttgaacccaggaggcagaggttgcagtgagctgcgagatcacgccactgtactccagcctgggtgacagagcgagattctgtctcaaaaaaaaaaaaaaaagaaagttaactaaaccattaattttgtaaaagtatgtgagatgagagatatgttaatcttcttcactacagtaaccatgttactacccatatgtatcccatagcatcatgttgtaatcctcaattatacataagaaaatttatcttaaaaactaaagagaaaagaaaaacaggtattaagtttttcagtcacactagccacatttcaagtgttcagtagccccatgttaccagtgactgttgtaccgcacagaacagatacagaacctctctgtcatccccaaaatttctattagacaacacttctagtagacaccacatttgttagcatgtgatgtttttgcttctgcgagtaataacctttcttggaatgtttatcttttatttggagagcttcatgtactctgaaggaatcccgttatattccctcaaggaaagcagatgagcagatggcttccacatctgcaaaatgttttctagagaaaaagtgacttgcccaaagtcatataattaatacgtagtggaaccaacttaatgaggatttagacctgcacctttctgaagtagaatcttgtgccactgtaagtccagctttgttcagtggagactgagtcagcttgagggaaaggattgaaagtttgctctgtgctgagattgaacaagctctcctcagatatttctgaaagcctagatgtctatgtcttcctttttgggtagtaggactgaaacagaatgggcctctgagaatggcttagtataaaccattaatggtaccatatttgggggaatgcagacagatgacagccattaatctgactgcacaataagccagatttgcatccatggctgcaatccacttcttacctacatccaatcaacaggaagttcacctggttcaagagagcatctacttttaaaatgtttccttttcgcagtgtggaaataacagttgctcttatgtctaggcagtccttcaggtactcacagtgtttcaaatttaaatcagtggtttggattctggagtacttttatcttgcataacaaatattattgaatgttggtttggttttcacctataaaaatctgcaatgtacataaaagaaataatacacctgaattataatacagaactataagtacaatatcaattatatgtaactgccatttacaacttgtcttttatgagactatacaataaacattccaactgtatgctgggaataattcttcccattctgttaacccataatagtttcaatggagtgcatgagctcaggtacgtgagctgatatgtcttgggctcttactaactttctacacctatataaatgatgcatctctcattggcaaagacacaaaagtttgagaacatgctggtgagcctgtgtgtaaatgatgatctcctatgataatggtggcagtgcaaacggtataattcctatggaggtcaatgtgtccatttttataaaaattacaaatgcatttcctctttgacttagcattttcatgtctacaaatttttcctatatatatatatacctgcatggtatgaaaggcatatatatataatatatatatatatataatcctgcatgatatgcaaggcatatataaaacaattcattgcaatattgtgcatactagacaaaggaaactgcccaagtatccatcgataggggactgattaaaccagtggttctaaacttcagtgtggatcataatcacttggagggcttgctgaaacacagattgctggattgtacctccagaatttctgattcagtaggcctggggccaatgggcaagcagagctaaaatccagcccatgttgcattctacattcatgtggggctggctgcatctgccctgaagaaggggcacctttccatagtttgcacgtaaatgctatacagctagcagtagtctgagactctatgaaaaagctgtcagtctcataaaaatcataaatgtattgttattctgataaaaatgccagcattgtttttccataggacttgacataattcaccctaaatttataaacaattcctacatgtcagtaagaagacaaatggggagaggatatggagtcacaggataagaaaccgcaatggccagtaaatatatgaaaggttgctcagcctcactagtaagtgcaaatgaaggcaccatttttcacctgttgaaacaggcaaaaatgtggaagtgggacagtaccgagaattcctgaggatgtgggaggaggtaactcttataccctgctagtgggatgtgaattgcgcagccactttggagggcagtttggctatatgaagtgcaggtgaagatgctcaccctttgacctaatattcttaacacacgcagtagagaaacttgtatatatgcaccaggagattcgtgcaccaatgttcacatcagcattgattgtatgagcaaaaagagaggaaatatgtgagaggtccatcaacaaggaaataaattgtactatatgttagaattataaataacagttaaaataagtaaactagaattaaatataccatgtacatgtgtgtatatatatttacatacatatatgagctatatatcataatgtgagtgaaaaaaacaagctgcagaatgataggtagaattaagcttgaacacatggataataatattatgtatggatacatacatacgttgtaagagtctaaaatgattgacaggtgtaaacaccagttttagcgtagtggtgcctggtgatgttgtggggcagggtagagggggttgcaaatgtagctgtagtattttgtttaaaatttttttgaggcaaatgtggcatagtatcaccattttatttagctgggtagtaggtatatatattattcactttattattctgtctgaactgtttcataactaaagaaaacatgcacgtacaccaaactgttgttacagtagtctataactcaatgtatctcatctcttggctcatataaagttggatacagagcagggtccagagaagctttgttaaagactttttaaataccatgcagatgatgggactggttcatagcagtactttttaaccttgattttgtgcaaaacagattcttaatcagtagataagaaaatctacctaattagtgcattttcccagggagccttatggtattagccagcaaagactgcagctttaattgagacagtgatgcaacttaattggaacacctgaatgcgattaagggagggggtactcatataaggtcagctggtttccctggtgcccagagctctgctgggtctatacctttttgctgacaacctctgccaactgggatgaagctgagccaaatgcttttactgtctttcttagatcacttaatgaaatgttttaaatacagattccatgtatttcagtgtgtattgtgaaacacattggcatgctgattctactggtaaactttagaacttattacatagaagcactagatatttgcattgcttttaattgttattgatgcaggagtttaatatatattaagtgaaataaattgataattgtgttgagactcaataatgtattttagttgattacatctttatttgggttctccagagaaacataactaatgggatatatatatatgtgtgtgtgtgtgtgtgtgtgtgtgtgtgtatttgttataaagaattggcccacacaattatggagactgacaagtccaaggtctgcagctggtaagctggaggcccaggaaagctgatgatgcagttctagtctgaaagctagcaggctggagacccaggaagaacccatgctccagtgcatgtccaaagcctggaaaagaccaatgtccaaactcaagggattcaggcaggagaaaatttcgtcttactcaggctttttgttctactcaggccttcaactaattggatgagggccacccacattgcccaatcggctttactcagtccacccgttcaaaagttaatctcttcctgaaacaccctcaccaacacactcagcataatgtcttggcatcccatggctcaaactgacacataaaattaatcatcaaaacatctttttgcctaaatttaagatcatttcacaaggcttctggacaatgtagtttttattaccaaagagtacttatattcctttattaatttaaaaaagtgcttgaattcctccataaaaattaatgtagtactaacagagaagaaaactctttaaaaattgacactaatctttaaaaaagttttttttgtaaatattctattactaactagttttgtgaccttggatcaattaatttcttgatctgaaaataggagagcattggaaaggacgattgtgatcccatccagctctagaggtctgtaatctttgatgttttcatcagtatatggatgttggaatgtgactggcattggtatgtctatgctacctgctaccatccaaatgaactcaagttgctttcttaggtggattgtggaatgtagtggaatgtagtctcagttatttacagttctacttcatacttaatctccttggtgcgtataatgactagttagaagtaagtgaatttcacctatgaggcctagactccaagcagagctgatgtcatgagattccagcacatttattaagtgctaggtgaactcaccttatggaagagcaatttccataggaaaaaggagtgattttaaagaatgtactatctacatagtcaatactattggattttcaggtggagtttttggcctctatttttagagcatcatgtaccatagctttgggggtaatttttcactaacatacattacttaggaatgtttaaatttagtgattaactgatccagtgactggcaatcattagattgccaaataaataaaatttggctctgtgatgagctatattttcaactgttctaggtcagattttattattggagatgtttgagttattatcagaaaaactgtatccagagacatagtgcttgaccaaatcatgtggacagtgggtcaaaaccattttggcatttcacaaaatcttgtgaggataagttagaacatgctaaagtaattttcactagtgagtattctatcaaccttgtgaataatttcagaaaatattagctggctacagaaatgttgaacggtttatagactttttttcctggaccctcccaagcctagcaatactaccttccattttctagccaagttcattccttactgttacacatatccccagactaacagaatgcaagcatatctgggccccaaacacagttatctagaaatgcgtttttttacattaatggcatagattcttgagaaagaaaaaatgtaaaatataaagcaagcatttcaaacaaatgtatgtctgtgtggagagaagaaaaatgaaataagaaaaagaaaaaaacataggaaaataagagagaaacctagaggagacaccatagaacctgatgtgttggaagggaaatcactgaaattcctgggcttgtggcctggcttattttaagtctggcctgatttcttttaatgtgcacgttgtgttcatttgcatggttgcaatctttaagcaaagaatattttcaggattttggaataatctgagagcccctgataaaatgagtgcagaaaaaatttaatgactgtgattagtcacaaaaagagcaaagggaatctcattatttcagtttctgaatttcagttagatgttttccttaaaaccaagaaaggttgtctaatgggcaaaaacattgttattcttcatggattcatagttcctgtgatgctctctgaaaaagcagctatatcagattaattttctttttcacactcttccctctcatttttgtaaagaaaaagacagccaatctgtagcttccttggggggcattagacagcttagaaaagtggcaaaataaacaagatttattctcatcagatgtatcatgagaaaattggaggcgtgctgtgaggtaatgacaaaataatcttgaaaatttccaagcacttcttccaagtggaatggaaggaaatttaaagtcagctttcatctatttatagctgaaacaagatgtgtgcataaatgtatgggcatatatattttttctaacaatactattggtttcctctcctaaaaaagaggaaaccaaacttaaggtcttagagttctagaaaggtgtcctctggaaaagttgaccacagcgggattttagtttctctatggaataaggtagtgggaatagtaacatgaaatggtagtgtgttttttcctctctgtccatcttctcccatttctcttacttatattaacctttgaaggtattgttccagaaaatgcacagtgccaatgggaccttaatttatttcagtggtcatttgcagaaaacaatatttttgcctctgcttacccattggagctgatatatactcttttatgtagcatctgtaagtacatgaggattcattgaatgcctttgatgggctaagctttgtggccatattagagatactgggcttgcttttagaacaggacttgggaagaacttagggtctctcacacttcgctgcaggttttgctcacagaatttgggacctctatgagggtaagtgttggaaagcaggaaacgatgctttattgtttgttcttaagcatgccttctttccatccagttgctggctgagccctacgagggtcctggcttggctttgatatatttcatataagctcttgggagaataagtgtttgtttgtttctctttgtggatgaatatccaaagtaaatcacagagaacttaagttggtttttatgtctcttatttttaactcaaggtgggatttctacagggtaggctgcagaatcaaggctatccgtgaatcattttgccttttcctaggagagactgttcaaaaacctgactctcaggcaccaataataaatgtgctttaaaaacacacatacactcccttcagttcaattatggagaatccaatttatccccgttctctaaggcatttaccagaagaaaaagagagtccttgggcattattctgtgtaattagatttttacacctctgtattgtgaattgggatttccaatttctccaccctaaggtgtaaagtgatggtgcttagcaacctaagaccatagctgatgttataattcatcaggacttttagactgttataatttgagaaactctggtgaaaataaacaatagtggatattgtaatttcttttataaatattaaatctattttattttttagaaccatttgtcttatttctcaaaattaatcttcacctgaaacctcaacagtttttaagaaactgtgccaatggcctgattaatcttctcatatgtggattttcctcagttgccaggaaataaccacctggttaaaataaacttatttttatttatttctgtatgtttcaccttcatagtaacagtaaaaatgcaatatctgaaagtcgtgattttttttttgcaattttataggaaaaaccaaagctaaaatgtggatataaaacataacagtctcaactatttttaaaaagaattgaaaaaagattagcagaaaatgtataaaaaacagtgtttggatttttgtatctttttgcacttaatcagtacatttttgtgcttttctaaaagtaattgaaataggaagctacatatttcagagaagattatagaatgtatcatagttgtgatgacacagaatgttgggggaacgaggcataatctgctataaatagtatcttccaagaaagactgctgataaacagtagatttgagttgatctgcttcaggactgggaactggttttagaagaaccttctagaatgagaaaatatacagatttgtcaggctcttcagacttcataaaagttttacccagagccttgtatttgctgtggtttcagactggttaaggaaaacagataagccaagaaaggattttgtttgtaaattatttcccacaaataatttcatggacaaaactcatttaaaagcttgaaaagaattaacttgtaagagtctgatttattattattattattattttcttttttgagatggagtttcactcttgttacccaggctacagtgcagtggcacaatctcagctcaccgcaacctccgcctccctgattcaagctattctccttcctcagcctcccgagtagctgggattacaggcatgcgccaccacgcctggctaattttgtatttttagtagggacggggtttctccatgttagtcaggctggtctagaacttctgacctcaggtgatccacccgcctcggcctcccaaagtgctaggattacaggtgtgagccaccgcgcccagccaagagtctgatattttataaacagatatgaattgaatttcaaatgtgtgtgtgtgtgtgcatgtgtgtgtgtgtgtgtgtgttcatttattttgagacaggatcttgctctgtcagccaggatggagtgcagtggtgtgatcacagctcactgcagcctcgaattcctgggctcaagcaatactctgcctcaccctcaccccacccccaccactgctgagtagctgcaactacaggtgtgcatcaccacacttggctaattttttaatttttttttgtagagtcaaggtctctctatgttgtccaggctagtttcaaactcctgcactcaggtgatcctcccatctcggcctccccaagtgctgggattacaggcatgagccaccatgcctggccaagagtgtatatttttggtaattaatattcaagctgaaaactgtacctttctcctttcctggggcattggcatgggttttgttgatagaatgcattgtaatttggtttactcttgaatatttactcagccattctttcattcattcaacaaatatttgctgagtatataaacacaatatacccttggaggagagataagctatatttgaacagctgcagtagaagtggtacacaatcttgggagaatgccaaagaaggtgtgattgcttccagctggggagatccaaagaggtttctactcgggttgggactgtcatgtgggcttgaagggtctgaaagtggctagcaggggacttagggggagaaaggaggagagaaggcacatgtatgcacaggggcaagaaggcttaagttgagtgaaagaagtgggaaataaagacagttgaggtgagatcccaggcccgtggtactaggacgaggggttactaccctaggcaatagggaaacattgaagattttttttttcttacaaagatagtgatatgatcttgcagcagcatgttaaatgaaagctgccagtccaggacaagtcagaaggttgtgcccctatgactaatgaggtgtgacccttatgactttcaaaagagtgtcttagtaacatcagtgccaagatttggttctgaaatacagttcccacctctaacatctgggcctttttgtaactcatgctacctttgagtgggaccaaggtggtcagctttgatttagcctctcctgttctgccccatcagccctggactccggccacttctcagaaccagcctctgccacacacaccaagctttggctcattccccataatcctccaggatcagccctggcactccccctcccactctggttttcacttttttgttcctgtttaagagctgagagttcctgtttttgtttttctcctctgtctctgctgtgatgctgaagtagggtagatacagagaattttttttttttgagacagagtctcgctctgtcacctagggtgcagtggtgcgatcttggctcactgcaacctctgcctcccaggctcaagtgattctcctgcctcagcctcccaagtagctgggattacaggtgtgcaccaccacatccggctaatttttgtatttttggtagagacagggtttcatcatgttggccaggctggtcttgaactcttgacctcaagtgatccacccaccttggcctcccaaaatgctgggattgtgtgagctactgcgcccagcccaagagacttttataatgtcgttgagagatagtagaggcttgattgaaggtgtggtggttgggatggggaaaaggaaatggaatcaagaaatttctggaaataaaagtggcaagatctgatgattggatctgggaatgggagagaaggagtcaaatgaatgctgagtttttgagcctgtatagagttaatggcttcaaaggggccagcagatatttttcttaattttacaaaggtgaactgaagctaagttatatggacagagttgtcaaagaggtgtgttagtttccttccgttgctataaggaaatatctgaggctgggtaatttataaagaaaaaaaatttagggtgggtgtgatggctcatgcctgtaatcccagcactatgggagtcgaggcgggtggatcatgagtctagggattcgaaaccagcctgggcaacatggtgaaaccctgtctctacaaaaaatacaaaaattggctgggtgcagtgatccactcctgtaatcccagcactttgggaggccgaggcgggtggatcacttgaggtcagaagtttgagaccagcctgactaacatggtgaaaccctgtctctgctaaaaatacaaaattagccaggtgtggtggtgcatgcctgtaatctcagctacttgggaggctgaggcaggagaatcactagaacctgggaggcggaggttgcagtgagccaagatggcaccactgcactacagcctgggggataagagtgaaactgtgtctaaaaaaaaaaaaataataagtgtggtggcacgctcctgtggtcccaactactcaggaggctgagatgggaggattgcttaagactgggaggtcaaggctgcagtgagctgtgattgcagcactgcactccaagcctgggtgacagattgagactatctcaaaaaaaaaaaaaaaaaaaaaaggtttaatcggctcatggttcttggttctacagcctgtacaggaagcataatgctggcatctacttctggtgagggcctcaggaagcttacaatcatagcagaaggcaaagggggagcaggtgcatcacatggcaagagctgagcaagagagaggagaaggtgccaggctcccttcaaacaaccagctctcatgtgaactaagggaacaagaacacacctatcccaaggggatggcactaagccattaatgagagatccgcccccatgacccaaacacctcccaccaggccacacctccaacattggggattacatctcaacatgagatttgcaggggacaaaagatccaaactatatcaagtggcttcttttagcatcagtgatgattaccttgaagggtgttatgcgcagcttagggtcaagtgaattgtactaacgcaatgcccagcacaagctgtaataaacaagtaggattagagatacatacctgtgccaaaaatggtggtatatcaaaatgtggaagaatcccttccattgcttttagtccttccattattgagtaatctcctttcagtataagacctggcactgtgttttataaacaatttaggaaagagaatgtgatactaaatttggtggcagggatatgaaaggaattcagtgcacaagaatcttgaaaacggtgatgaataatgtagtttcagctgaggttattttgtgtggcccctgtgggctgatcacttgtttgaatgttttcattgtggaatattaaatagtcaaaattgattgatcaactaatatgtgtcaggcactgtcctagatagttttcaatatacagaatattttatttgctcctcatgaaaccctgtgatatgggcatcttattatcctcattttgcaggtgagaaaattgaggctcagagagagaagctcaatgaaacacagcccctaacttacactttttcttcagttcattaatgttgatgttttatttagttggttttaattcaggaatgcactgagggtcttctatgctgaacctttgtgaaaatgtaggttgtatttgtttggagcctgcaatgggtggggcagctcttctgtatacagcagggcaggatggccctagtgcaagagttacagtaaacagccggcttttttcttctccttaattccttagttcagcttgaggactttatcctggtgcttgcctaagggacacccacatcaccattatcatcatcattttaattatgatcaattatggaacattttctatgtgccagctatcatgctgagcactttactgcattagttcatggaatcattagaataaccttatgaggctgctactcttgttttcttcatttaacatgtgagcagaaagaagtaactcacatgagatctcacagctggcaagtagtagagatgggatttgaacctgtctgattcctaaccacagtggtattttgctccaacatcagactatttttttttaaattagaggtggggtcttgctctgtttcccaggctggagtacagtggtgcaatcatagctcatcacaacctcaaactcctggcttcaagcaatgttcctgcctcagcttcccaaagtgctagcttacaagcaagagccaccaagccagaccgtcccctgcctcaacaccagactttgctctcagtcttaggatccctacattgggtacttatttatttggatttagataggcttaatctaaagtccagatacacttgccaaataactttaggttccccccaccccagaacatatgatattgttagctatatcatacatagtttgaactagttattagattaattacctaaagaagctgcaattgcttctttataagcgctacctggtggatgatgtgttaatgggacagtatgcagatattcaaattacagaagcatttttctcatatatcagaagagagcattatggcacctcaccagaagcagggcgtccctggggaggcttggtgatgtggcagaaagtcagctttcaaagctttatagagttcatcataaaatgacattcacctcctttcatttcaatccaagtgctttcaagagtacaaaaataaacattagaaattaacaggctgcttttctgatagaccaaacagtggctacttggacctaaagggcaaattttgttcatcatttatatgttttagtaaagtgagattcgttctcattgtgggaattcccacactgtcccactcctatgtaagaaaattatagacaagcatagagaattacactgcataaaagctgatagcataataaccaattagatgattataaagcctgagtatattaaagtattatgcaaatactgattaatagtaataccataaatgcacagagcaagcaaaagcatgcctgattcaaattataggagcttttatttgcatttctacagaatctattattagtgggtctcaaagcaccttacaagtaataattattaaagctcacatgaccagtaaatgccatgttatgaagtgaatatgaaagaattcctctttacctcatttatagtataagacctaaattcccaaacaaaagtaggattctctgcatatggagagtattcatacattatgggtgtttttggctatggttctataggcttagaaacgggttgctatggattcaaggctttcctattgagtacctcaatctatgtagttagaactcttcacttatttttgaaatttaacccacatgatagctctaaacaaatcttgccagtatattttaatatctctttattgactataatatcaaattttaaaagcaaaaatgatgtcaagttcacatgaaagtactttaaaatattttggaatattacagcaagtttatttttcctcaagctgtaccctgttctgcggactcatcgcttacgagcacaatcagtgaagcctgtgtttctttctgtaccctgcagcaagtagttgaaatgttgtaagggtttctaatctgcatgagaatgctcctacacccaccctttcccctctattcctccttctctcttccctcctttgcaatttccatactctctaaagctaagcacagattggaaaggcaagaatgtttcaggtgtctgactctccctgtccctccatctcaagtcctcaagcttcccccacatggttcatactcagtttgatttactttcggtgctgagagactatttaatatattgcagtttctggtcattgtgaggcagctggactttcgtactgtacttatatttcaatggcatgcagatccaaagaaatgtgtagactagtgagcaccttcctttatagttaggattctggagccttgagagtcgaatgacttgactgaggttgtacagctggtttctgcctcacagaatcgagaccagagctcaggtctctaggctcttaaaccaaagtttccccctctgtctcgtggtggttatatactgctttgaatcacacacaaaaattttaaaccagaaatattggagcagagtgagaggaaacacttgttgattttatccaggactgtgagtcacaagactagaggtggagcctcagggatctgaagaaaaagggagtgatggccaggtgtggtggctcacgcctataatcccagcactttgggaggccgaggcgggcagatcatctgaggttgggagttcgagaccagcctgaccaacatggagaaaccccatctctactaaaaatacaaaattagctgagcatggtggcacatacatgtaatcccagctactcaggaggctgaggcgggagaatcgcttgaacccgggaggtgaaagttgtggtgagccaagattgtgccattgcactccagcctgggcagcaagatggacactctgtctcaagaaaaaaaaaaaaaaaaaaaaaagagagtgatgtgcttgcagaattgaaggcatagacctgggattatcatttggagggaggagctgaatgactggaggtcgaggagaataaagaacaagtagaagtggagagagggcgaggtagaagaacagtcttaggaggattagaaggatggttgagtttatggtcatggcgatagtctattgatagaaaataaagcaaaactcaataggttacgggatttagtccttagggtcaatttagtccttagggtctgtgaagcctctcaggatgatgccagaaggagagggagagatggggcatgtgcagcaggtagcaaagttctccgggaagacagactactggcaaatatctgggaaacaggggtgactggagggatagaaacaggggtgactggagggatagaaacagagagactggagggatggtttttggaactctgtagataggtgtatattctgtgctatacttaagaattctaattttcatatttttctagggaaaactgaggctgccatcaaaaacttcagtccctactacagtcgtcagtactctgtggctttctgcaatcacgtgcgcactgaagtagaacagcaaagagatttaacgtcacagtttttgaagaccaaggtaagccatggatatttggtttacatgtatttccccttgaagaaggctatatagcacagccgtatttctgaaataaacaataatttgaatggcagttttaaaaactctgctctgaagtcgtttcatgctcaaaaaactctatttgcctggaagttagaatgtatgatttcttgttgctgatataatccatagaaaaaggaaattagcttgaatccaatattgttatgtatttttcccacatggatgctttgtttgtctaagaaaatttgactttctgtagtgaagttttggtcattgatcaaatatgattttctctttgaatcccctaatttattcttactcctttgctccattataataagtaaccaccacctcgacaaatgtttgttagcacctactatgtgctaggctatagtccaagaactggggaattaagacaagttctctgccttcctggagtttatattcacacgcaggaaacaggtaataaacaaattaatatcaggtgacatcagataataataaatgctaaaaagaaataaagcgagtcttattttatttttgagatagagtcgtgctctgtggttcaggctggagtgcagtgatacaatcgcggctcactgcaacctctgcttcctgggttcaagtgattctcctgcctcagcctcctgagtggctgggattacaggtgcgcaccaccacacccagctaatttttgtatttttagtagagacaggatattcaccatgttggccaggctggtcttgaactcctgacctcaagtgatccacctgcctcggcctcccaaagtgctgggattacaggtgtgagccaccacgcccagcctagagccttattttagagaagatggttagggaagccctctgtggagataacatttaagcagaaactggagtgcaatgagagtaggctgtgtgaatattcgtgggaagagtattccaggtctatggaacagcaagtgtgaagaccctgccacacagagggaaggtcggtctgctgggagcactgtgagcaagggaggagggaggaacaatgacagcagagagacagatcgggagcacatcatgtcaacctgtgggtcacaacagggttttgattttgttttgtaatgggaagtctcccactggagggtattgaatacagagtggcatataattttagatgatctgtctggcctctgtgtaaagaatagactatggggcgagaggggagaatggaaactggggagcaggatactgtagcatctgagggaagaatgatgccaaattggactggggtggtgatggtcatggttgtgaggagaggtgcttatgatagagctgacagaacatactgttgggttgggtgtgagataatagaagaagagagaaatcagtgatgacttcttggtttttaaccagagcaaataagtggatggagttgccttttacttagaaggaagagtcggagtgaatgggatcacgagttcccttttggccatgttaagtttgagatgctagtgtggaaatgttgaataggccattagatgttttcatttggagctcagcagagtgattgagcctggagaatagaaatttggaagatgttagcttataactagtattaaggccatgggccataaaacagggaaagactatagacagagaaaagaaacagtacactggccccttcagcatttggagatcagaaaaaggagaaggatccagcaaaatggactaagaagaaacggtctatggagtaggagaaaaatcagaaaagcataatgtcccagaaggcaaataaaaaaggggtttcaaaattaagaactcaatcccatttataatagccacccccacccaccacacacacacacacacacacacacacacacacacacacttaggagtacatttaaccaaggagatgaaagatctctacaaggactacaaaacacggatgaaagaaattgtaggcaacacaaactaatggaaacacatcccatgctcacagattggaaaaatcactatcattaaaatgaccatgttccccaaagcaatatacagctccaattcaattgctatcaaattaccaatgtcatcttacacaaaattagaaaaattaatcctaaagttcatagggaacaaataaaagcctgaatagccaaagcacgcccaagcaagggaacaaatctggagacatcacattgcctgacttcaaattatactacaaggctatactaactaaatcagcatggtactggtacaaaaatagacacatagaccaatggaacagaatggagaacccagaaataaagccacatacctacaaccaactgatctttgataaaatcaacaaaaataaataatgaagaaaggataccccattcaataaaaggtgctgagaaaactggctagtcatatgcagaagaatgaaactggacccctatctctcattatatacaaaaattaacttcagatggattaaaaacctaagtgtaagtcctgaaactatagaaatcttaaaagaaaacttaggaaaaactcttctggacatttgcccaggaaaagaatttgtgatgaagaccccaaaaacaaatgcaacaaaaacaaaaatagagaaatgggacttagttatgctaaaaagcctatacacaaaaaagaaatagtcaacaaaataaacagataacctacaaaatgggagaaatatttgcaaattatgcccctaacaaaggactaatatccagaatctacaagaaactcaacaagaaaaaacaaccccattaaaaactgggcaaaggacatgaacagacatttctcaaaagaagacatacaagtggacaacaaacacatgaaaatatgctcaatatcaccaatcatcagagaaatgtatattaaaaccacaccaagatatcatcttacagcagtaagaatgaatgtcattaaaaagtcaaaaaataacagatgatgtggatgtggagaaaaggaaatgctcatacactgttagtgggaatgtaaattagttcaacccctagggaaaatagtatggagatatcacaaataactaaaaaagaactatcattcgactcagcaatcctactactgggtatctacccaaaggaaaataaatcattatataaaaagactcctgtatgtgtgtgtttatcacagcactatttttaatagcaaagccatggaaccaacctaagtgtgcaccagcggttgattggataaagaaaatgtggtatatatacaccacaggatgctacacagtcataaaaaagaacaaaatcataccctttgcaacaacatggatggagctggaggccattatcctaagtgaactaactcagaaacagaaaatcaaataccacatgttttcagttataagcaggagctaaataatgggtacacatggacataaagatggagagaatagactctggagactccaaaagtggggaaggtgggaggggagtaagggttgaaaaattacctattgggtacaatgctcaagatttgggtaatgggtacactaggagcccagtccccaccgttacacgtaatacccatgtaagaaacacacgtaccccttgaatataaaatttaaaaaactaaaaataaaaaagaaggggtttcaagagagaataagtgataagtgagtcacataatgctgagaagttaaccaatatatttagcagcatgagtacatagggataagtgattgctttccctcataaaacagtgatctcaaaatttagggagcttgttaaaatgcacattatggcccacagctccagagattctgatatagtaagtctatcgtgaggccccatttttaacaagcttatcagttgattaagtggtccaggttttaagaaaagctgcacataagaactatgaagttcagcttatgccatggtttcagtttcatttaaagagaagagattctctcttaccttttaatgaggcaagataggggactgccgcattatctgtctcctatcttgcctcattaagcactggaatttggaagggaatttgtttcatcccttagattattcttaaaagagattggcatatctattttttttctgtatagctcatttaaaattttacttgaaagtagaggggtaagtttctgaaggcactatgattttttaataaagggaaaatagatgtaaactcagtgacatgtaaaagaaaagaggcccatttgtatattttgaaataatatgaaaattacacaatgaagccggatgggaattatccttacacagttaatccaatggaagatgtaactaggaatctaatggaaatgcccgcacagcacatatatcaccacagttaataagaaatcctcaaacttttcagtagaagcggtggaactcaggtgttctggcttgatacctgcttgttctttaaccaaatagcaaacatgatctccttgagtagcatggagaggggtccccatggctttgggtttaggaaaaccattgagaattggaggcagcatcggcaggtgtaatggataggggaacggtctgttaattctcccgctttgcggggattaaccctgagtcatgttcagggtgtccaggtaggtatccacacttacactttcctgcctcactccctctctcccatagagtttatcaagcatttattgagtgccacatgcatgcaaggcataataaccttattactataattccttctaccatatgcttctgttcctatagcataatagagggaaatgaaaatcataaaaataccaataagacaaatatttacattgggtcaagtggagtaggaaagggaaattgtggggggagaggaggaagcaacagtttccccaggatctcagtggaagatagtttcctaaactattccttgaaatagcatggataactttgtggtaacaaggtgtgttatcttttgttgtgatagttaattgtattcatcttctttaagccaccattggcgcctggaactattttgtatgaagcagagctatcacaattttctgaagacataaagaagtggaaggagagatacgttgtagttaaaaatgattatgctgtggagagctatgagaataaagaggtaagacacttctttgttactactgattcttacactgttcttaaaagtttggctcggttgattggtgtgccctctccttcctacaaggctatactaacaaaatcagcatggtactggtacaaaaatagagactgattcattcaataagcactcattcatgtaggtatctatttcagctaacagatactgattgaatgcctactgcataccaagtgttatacaaggttctgggtatacagcagttgataagacagatgcttgccgtctagtggcaagatagactttgaacaagtgattgcaagtgagtatgaagacagaaggaccagtatttggcatgggagcctttcctatgatcattcagccttgaggtctttctcagccaccatcctgacgtctctgctctatgtctctgtcttcccactctgaagccctgtgcatgacaggtggctcaggagttatttcataggttgctattaaatttgaatctgcctgggttttcctgggttcctaggaattcagaatgcctcacatactttatttccatggaggtatttttttttcatttaacttttttctggttatttcactattttccttgtctgtaaaatgtggagaaagtgagataatgggtgtaaagcattcagcccctgggaggactttagtttttattggttcccatttctttccttatgtaggaaggtagtgtggtataggggaaagaatagcaggcagtgaatttggcaaactaaaggttaggtcaagttgtgccattaactagaaatgaacctgttgacaagtgacttcttgccttcagtcctcaattaagctaaacagttaggtcaaatgatcccactatcctcccagatctcatactgtacacattttttagtctgcatagaccctcaagctccctttgaaatgaacagctactatttatcagtgaacgacagtaacagatttaaaactctgctctctggcctctaagctcaagaatagtcaagatggcgaggtgcagtagctcatgcctgtaatcccagcactttgggaggccaaggcaggtggatcacccgaggtcaggagttagagaccagcatggccaacatgatgaaacctcatctctactaaaaatacaaaaattagctgggcatgctggtgcatgcctgtagtctcagatactcaagagggtgaggcaggagaatcacttgaactcgggaggttgaggttgcagtgagctgagatcaccccaatgcactccagcctgggtgacagagtgagactctatctcaaaaaaaataaaaaaagagtagttaagatagtcttcacagagcactgtgaggactacacctgatgctaggaagaggcttcagactgacagaccaatctgtttccttcccatttctgatggaaaatagaaataaaatatactacaaacttatttcacaggctaccaggcaaagctcaagtgctctcttgggtagacttactcttttcaacatttattaagctaatattttctctgcttatcaatattaggattttattcaacacttaatttgtactcagcaacaaagtatcaatacactacaaatagtgatgataataacaagacaccttatgttttgtatgactcattacaacgtcctttcagaggagcttgaggagggacagtgtagcataatatggttcatactatgggctttgactcatacctttaccacttactagataggcgcccttgcctaagctataaatcttgagcctcagttttctcatctgtaaaatgagatctgcgtgatttctttgccatggtgttgagaggagtaagtgaatgaatgtacggaagcatttagcatatggctgggcctgtggtaaagctagagctgggtgtggagcagttgctggtatgattactactaacccattgggaagaaacagccctagatcttgttcttggatttattaaagtttttcactgcatttaacactaactgaggtttcattttgaatcaaatgttggtgtttttcctcttttcacttatttcagcttgctctctcagcttgcagtttgtacattgcactgctttttctttgttcatcgtttttaactgaacctgttcaaattgttaagatatggtgacttaatttggtaataaccaagtgttttttgaaacttggaattcttttaaagtccacgcagtttgtcataatttcttgaagttttaataatatcttctttttttaatttatggaagtatcttataaaattatatctaagaattatgcgttaagtacctgtaagtcatctattattttatttagagtccaattctggctggcaattaaacaggaaaagtaaaacattctcacttgataatcagtttctattttgtgtgcactggggctggacaggcatgaatataaatcctggatgtgtcacctactcactgctgggccatgggcaagttattcagtctctttgagcttcatgtttcccatttgaaaaatggagataacatgtaatgcatagtactgttttgaggattaagtggtataatgcttataaaagccaatattggggcctgttataactagtaatacaattcacttttgagtccagtctaaatcaaattgcttgtaaatcttcttaatatcatacaagtttagattcttctctcaacattattgtttcactataatgtagctctgtgggagttcttagagctgtaaggtattatttcatggggagccctcaattatgtatagatcctccttcctgggttaatcatttattcagaagagtcctccaatcgtctttcttaggatgaataggtcaggctgccagaattctgtgttagtgggtatattctggttccctcacatgcttaagcagttgattagtcgttgttacaagtaatttagatatctgagagtttgtttcatttggatctcttcactatcttattgctgcagaacgtgttatcgttactctgattatgttggtcagatcaacattatttagtcatttccaagagtaaattctagattttgggtctcaaactttcttagtttcaattctcaacttgcctttagattactagtttcagaattttgccttgacttaagccctcccgtcagatgcacatacttaaatgttatcttatctgcatgtccttgtgggcataggtgcttaccaaactgctttggcaatgccctgtgcctcttttctgtgtctcaaatagcagagcttcttgtctgctggccagcatttgttctgatgtcacagtgctgtacttccatctcaaccattttgctgcaaaacagtttcacatctgagggcaaaatagtggcatattttatgccaacattttcatgttttgatgaaaatccatggtaactatcattgcagctacgtgttccacagtctcattagtcatcctatgtggcccacatcagtcaccaagcattctgtgcagtatttgtgtgatcgtcacctttgtggttattatcagaatgatttagttgttagcatctgaaatggcaaatgtggtgcagactttcagggttactgagattatgttttccacattcgagaacataactagggtaaatctccctgagattagggactctgatttaccatgttgtgactgtcacatgaaagtattaaaatattaccttgccattagcaggtattcaaaacatattttttgagtaaatgactataactcaataacatagtatggggattgctatctctgaatgtctgaatctgtctatttgttatatccctgatattttccaaaaatcaaatggggaaaaagatatcattcctgtgtgcctttccctccccaggcctatcagagaggagctgctcctaaatgtcgaattcttccagccggtggcaaggtgttaacctcagaagatgaatataatctgttgtctgacaggcatttcccagaccctcttggtgagttgctgatcattcttttccaaggcaaaatgactaagcttctttgtttagctggagcagtgtttctctgtgaaggagagggatttccctccagggacatttggcagcatctggagacatttttgtttgtcacaattggaatcggggtgctatggcatttagtgaatagaggccagggatgctacaaaacatcctaccatgcacaggacagaccctaacaaggaagagttatctggtacaaagtatcagtagtgccaaggttgagaaaccctgggctagtcactcatgtcccatagacaagtggaagatgtgatttctctagttgaggaaaacattttaccacttccattatttctaatcccattcaataatacacagtcagtctctgtgtttctagcacatggaaaatgtgctgtcagccaggtatcttgaagcttttggaatatattgcaggctttgatagcactccacaaggcagcagaaataaacaggtagggcccagtccatgaaatatacaatcccatcttctagtaagcaagcctggacctgtcagggaatactatttttctaattttaggatgatatgcaactaaataccctaaatagacaaaaaaccttttaataagtgttacagtaactcatagctactgtgaaaaaaaaaagcattgcattaatttgcatatctataaataaagctgggatgctgccatggaaagataattgggagattggatttttatctagttctggctgtgccacttaccaaatgctttagcttagccggctgctgaacagctctggtttctgtttctccaactcaaaaacagggctttgaacttaaaaacctagaagggtctttctaggtctaaccttctttgattctcattcattccactttttacatgtggagaaatgatggataatatatagactaaataaggcaattcatagagattcatgaagtgtggataatgtaataactccatttggctttgcataaatcatactacatagtaattacttggttcttgaagagagccctggttcttattaacggacataataatttcattagaatttatggagaaaaacataatcattttatcaattgttatttcggtgctgagtgcttaacatagtgtttttaataacacaattacaggattggtacatggaccataaactaagattaacaaattattactaagtaattcatgctaaaacaacactttatgtgcactatgcatattattatattttcttttacatctacttatatgcccttggcagtggagctgcagctagaaatgggaataccaacatgttgactcatccaaatctctctaaaactttccaatgaaatcagccagaagagacaatatgtttattgatttattgctgtaatcatattggagggaatgaaaaggactaaaaaacacaagtcctgtgtgattaatcccagttggcccaaggcttcagattggggcattttaatgactttttaaaattgtgtgttgtgaccttctgacttttaaaatagaatattctacagtagatcagttgtgatattcttgtaactcagaaaaaattcactgatggcatctggaaaattgttgtaaaaggttgagagataactagaggctaaaaggaatgaattttatgggtttgttgaggctttttaaatgcaaaggatcaatgttgcttttggttgcttgtacaaaattatgacattcttggagagggcaaggaggattgtttgatagaaccatgtcagtcaagaagactgactctgtgatattatttctaccagaaagaataaaagcataataaagatgggatgcttatgaataagtgcatttcttggaaaaagcactagaggcttatgaataagtgcatttctttttcttttttcttttgagacagagtctcactctgttgcccaggctggaatgcagtgatgtgatcatggctcactgtagcctcgacctcctgggctcaagtaatcctcccacctcagactctcgagttgctgggaccacagctacatgccactatgcccagaaaaacaaaacaagcaaaaaaacaaacaaagaactgcagagacaatggtctcactctgttacccaagttggtcttcaactcctgagctcaagtgaccctcctgccttggcctcccaaagtgctgggattataggcataagccaccatgcctggccaataagtgtattctttacagagtgttcagctaagttgatacagaaaaaaatgcccccgtgttttgttaaagtaattcacttgtttggcattttactggttagaatctcatttactgcatacaataaaaaactcaaagttttattatctcactaaagatatttcgatattagttcagggctggtgtggactaaatttgtctgaagctcaggctctttcttgctttctccccctttatttctaggttgtggccccttttggcagggtccagggtggctgctgagctcctaccatagcattctcattccagataatagggaggagaaaaggaaaggaggagggtacattcactttctttagagatacctccaggaagtttcatatgccacttcagcttatatcttactggacagatcttagtagctgtgggctcaccaagctgcaaaggaggctggaaatgtagtcttattttatgtagtcacttgcccaactaaaaatcaggggccttattctccccagaaagggaaatagatactgtgttacaactacaggtgtctctatagcattcaatcattcattcatttgctcgttttcatgttgattcattcccagcattgtgctaggtcctggtgggccatggcttgtgctggtggtgcattctcctctgttaccttcagattccaggacactggaacagggctcccatatatccccagaaatttattctttatttaaaccaatacggattgattgattgactgattgattttgagatggagtttcgctctgtcacccaggctggagtgcagtggcatgatcttggctcagtgcaacctctgcctcccgggttcaagtgattctcctgcctcagcctcctgaatagctgggattacaggtgcatgccaccactcccggctaatttttgtatttttagtagagatgggttttcactatgttggtcaggctggtcttgaactcctgacctcatgatctaccctccttggcctcccaaagtgctgggattacaggcatgagcaatcctgatttattaatttgccagaactgatgcggttctgtagactcccatgtggtcatgattcatttccttgtattcccagtgctttcaatggcctcttagagagaccttcttccttacctttccctgagattggtgcttaatacatatgcaggaagcacagaactaacattttcttctgcttattttctgtgactctggaaaaagttggaactcatttaaccaagtgcaatatcatgtaataggaatgcatggaaaggagtaaagtttaggtaggggttctgaatagtagtcggtttaaaatgagttgcttggaattgattttgagggaagaggtaaaagtcccattgtctagggctttaaaaaaatatcctaggccaacaaagcacatttttcactcaacaaactgaagttgaacatctgctatgttccatgactgtgctgtgggctaaggatacaaagctatggaagatgcagtctgcatctctagacgttcacagtgggtagcagtggttctgctccttgcggaggggaacagcacgggaatccatctcattcccctcccccgcctccctaccctgagtgtgggcgctgggcatgaaaacaggtcattgcagtatttggggagaacagggtaggaagcacctaactctgtctctggtggcagtgggatgtgccagcaaaggcatcccagaggagtggcttttgaactgacttttgaaggatgaatgagaatttttttatgggaaagcatgatggaaaggagggaagagagggttctatggactgtaggaacaatataaaaagtcacggaatgggtgaacacaccctgggagggtacagactgagagtggaggggaagccagcacagaacagggcaggcaccgatgcttagcgaggagatggagagagtcagcagaggaaccaataaaggtgataaagaagaaacaaaattctacaaagcatgaaggaaaccaggagagaggcactcctggaagtcatggggagataatgttttcaaaagaaggggttgttagcagcagcaaatattccaggtcagatgaaaagaagcagccataggctggcagtcaggatgacataaatggcttcagcagttgggtttcaggagctggtggggacaggaatcagactgaggtgagaataaggttgatggcataaaaacagcaagtggtgtttggcagtgacagggaggagggagagagtgcagggcagagagctgccctgttggagctggagcctgcagggccagtagagtgagggggtgcacaggttgtcagtggcctgcagaggggcaggagggcagaggaagctccgtttgtgggtctttagacataaggaagttgagaaagattgtgcccaggctgggcgcggtggctcatgcctgtaatcccagcactttgggaggcaaagtcaggtggctcgcttgagctcaggagtttgagatcagcctgggcaacatggcaaaaccctgtctctacaaataatacaaaaaaactagccgggtgcggtggcttatgcctgtaatcccagctactcgagaggctgaggcgggcagatcacttgaggtcaggagcctgcccaacaaggtgaaaccctgtctctactaaaaagacaaaaattagctggaggtggtggtatgcgcctataatcccagctactcaggaggctgaggcaggagaatcatttgaatctgggaggtggaggttgcagtgagcaaagattgtgccactgtactccagcctgggtgacagagcgagactctgtctcaaaaaagagaaaaaattgtgttcctggtatcctcactgtccctgtgatgttgggtaggaggccaggcagaccgcagtgggacaggggaagctggtggagggatgccagaggagccagtgctcccagtttccctatcctgtgaaaatatctcaccaactttccatcccatggcctgccccagatagtcaccctcacgacctgaaacacacatttgaaataaaagatacatgttttaaaaggtatttgtgttttcaatatttctttagcctccagtgagaaggagaacactcagccctttgtggtcctgcccaaggaattcccagtgtacctgtggcagcccttcttcagacacggctacttctgcttccacgaggctgctgaccagaagaggtttagtgccctcctgagtgactgcgtcaggcatctcaatcatggtatggcgcggctcccctctcatccccggggcgggaagtggggcagccctcgctgagttgttctggtccatcatctattgcagtgattcttagaaagagccacagatgagccaagtgcggtggctcatgcctgtaatcccagcactttgggaagctgaggccagcaaatcacaaggtcaggagttcgagaccagcctgaccaatatggtgaaatcccatctctactaaaaatacaaaaaaatatagctggacgtggtggtgggcacctgtaatcccagctacttgggaggctgaggcaggagaattacttgaacccgggaggcagaggctgtggtgagccgagatcgcgccactgcactccagcccagatgacagtgcaagactccatctcaaaaaaaaaaaaaaaaaaaaaaaaagagccacagatggtgctgcccagggaagaagagggaaacaggtaaagggagagttctgtgcacaaggagcctcacctgcttgctggttttcaggcaggcctgggaggccccggtgaagcagaacatggggcagttatctggctgcaagttggggggtgtcacattctgactgtcctgagtttattcatgtagaccattttgcatatacttcactctccttcttcctgatttaaaaaaatctaaatgccagcaagaacatgccagttttccctggcaaatgctagtctttttgacatttcctttttattttcacctttatttctgaataacagttactcagttaagatgagtggcacggtccgtggtaatctagtatttgtttctggatcagtgtttcttaaaactttagggctcataagaatcaccaggagaacttaattaaaacacacattcttaggcttcacccccagatattctgactcactgggtacaccgtggggcctggacttggcttttctagcacacggccgagtggcgctgatgctgctggttcgtgaaccacccttggggtggtgttgcttcaggccactttgcctccaggcatggacttaagcaatgtgacatcaatagtaaaagagacttctcattccaatatgtgatgtttttgatatactgaggtgaatgctggtttttctggactccacaaagtcttcagttacagataactgcgctctttgttcttggcacttggaaaggcagccagtctaagagtactgagggcttactctgtgccagcctctacgtaggtgttaggaagagagtaatgaagcatacagagttcctgtctctgggagttgaaattcaaacagggaggatggataaacacccaccaattatcatttgaaagttatcacagttaatgggttaaagagcaatgagaggttactaactagtgaagaaaggagtgccgaactttcagctctccaggggagtcctgtatgagcaggtgacatttgagctgagtcacctcacccattgtgcctttatttcctaatatggttaatttcactgtatacttattttaaaattcagaggtttccctgagagtgtcagtcccacagagcgagagtcactagtgatgcatctcaactaactcttggttttagctgtgtattgatggggactcacggaaaaagataaggtcagtctgttttgccacagcaaccctgagtaacattcatcatcatactggatcataactagttaggaacttttttaaaaaaatgatacccttattaaaatcttgccttgtgtttttgatgttctagagacaaaaaattgcccagcactgactgcaccctttagctcattttccactacacttgcccgtctgtgtttagggcctcggtctagtaggaacatgcagttggcactcagcacaggaactgcgaagtttcactgagtgcagaatgctccctgcccagccaaatgggacttactgcattccccctttcatgtacataataggactttctctgaggagtttttggatgttatgtagcctgcatttagactccatttatggaagatttcagcccattcaaaaccccactctgctctccagtatgttatcaaaggcaccaagataatgaggtctagtcatatttccttggttctgtgtcacattcctctgctcagaaactgttttatcctcgctgaggctttatgtggacttaatttggcataacttccagtagctccagtcagaaccagaagctgtgataacattgtagggaacagtccttgactatcatgggccaaggagcagacctttcttttctcgcctctttttctgtttttgacagcatgatgtaccactcatctttattgtgtcacattttctgttctagtctctgcctgttactcattgtattattttgagtaaaccagaaacaggctttcacaaggtgccacttaaccactttttcccataattacccaaaaagttaagaaatatagttaaaattagggctgggataagggccagaaaccctgaggtggctgctgggagcctgctatcctctacccgcatgcagatgaggaagggctgtcagcctgctgtggccattgtttcattgactctcaggccaccgtgcttctctgttgagaaccgggtcctaggcattctagtatcagaggcgtgtgaaccagagcaactccatcttaaacaggagctggaaatgaggctgaaacttactgggctgcattcccagatggttaaggcattctaagtcacaggatgagataggtcagcacaaaatgcaggtcataaacaccttgttaataaaacaggttgcagtaaaggagccagcccaaacccaccaaaactaaaattgcaatgagagtgacctctggtcatcctcactgctacactcccaccagtgccatgacagtttacaaataccatggcaacgtcaggaagttaccctacatggtctaaaaaggggaggcgtaaataatccaccccttgtttagcatatcatcaagaaataaccataaaaatgggcaaccagcagccctctgggctgctctgtctatggagcagccattcttttattccttaataaacttgctttccctttgcactgtgcactcgccctgaattctttcttgcgcgagatccaagaaccctctcttgggatctggatcgggacccctttcctgtaacgctagcagctgatgctaggcatgttgatctcgcttggggttccaggacatgtctcctagcactcaaattccaccacaacctagcccacttgcgccagaagtgttgggtctgaatttggctacattttcatgttcattcattctgaatctagaacccccttgtcctgcttttccttatagggtgggcgtttcctatttaaccctgatgaagggcctgattatgccctgttctccaacagtaaggctagctcctaaggtaggtaagggccagtagagagctctatgtttctccctccttcaaaagagagagcagcctttaggagcctcaaagattattttgtatcctaaggagaataaaggttgtgtgtgtgtgtgtgtgtgtgtgtgcatgctcacatgtgcactttcatgggtgttttgcttttatttagttttggcacctcttcattgggcaggcataagaaaatcccacaagattaatccttagtaaaacatcccactccacctcactggactaaatgtcaagccaactgtatagtatgatcctagaatagtagctgctgtcctctgtcccttttggagtcacactgtaatcccttgtctctgatcagggaaggctgtggttctgaatgtctgctgccacaaactgagacttatataaagccaagatgttctgagacagtcctgttgtccaaaatgcaatcctattcttcagaactttagtttgcaaaatacgattgtagttatgggttatagttaaagctcctgacaatacagagggctgaacacatgcgatatggaataatgatcattatcgatgcaagtctgttcttccagctcaggataatcatttcttggcatgtaaatgtgcaggaagaagaaaaagtgttcctggaggaggaataggatatgggagggccaggaagtaagatagagcatggaccattaaaggaacaggaagaattttgtgtgactggtgcttagagaggagagaggaagatgggcaggatccatgctataaggggctttgtgatgcatattaggaacttggactctattataacagcaataggaagccattaggattttaagtaaatgagcaacttcatcagatattcacttcagaaaggtcacaatggctgcagtgtaggcagtggatgagagggtagcatggtgggtggccaggaggccacttaaaaagctttggctggcaacagatggcagtagcttgcaccagagtgagggaaggcatttgtcaatatcaacccatggtactcagactaaaggatttgggggaacagaggaactggatgttagaaggcagccatcactggatgaatggtgattctggaaaggaggtgtaatgctggcaaagttttgttcaacagtgctgtgctagcttgaaggacagccaggactgccactaaacagatgccagtgttcacatcgtcatgaacacaaagaaagagaggacagtagactatctgggaagcatgtgtgcacacgggttgaaaacggtagtatcaaagaaaagcccatagaattttggtgaaaagaccacaacaatataaagacactctgcaaatcagtgcttcaagttggactagttcaatcacttatgacaatggtaacatccaacattgcttgtatggagtgagtcaggtggaatgtggagctataacagtgattatgtgttggaattggttactctgtcagtattacatgccttaagctcttaccccagaaatcccatgcctttattagatttgattttgatacttgcaagttttaggtgttcaataaatgttgtggaattaaattgaaatttagaacaacaaaggaccttacaattcaaatcagacagagcaaatcctttttggtgtgtttatttgaacatgatcttcttgctgtgcaacactcagcagcaaatctcagctctattttccccagcttattgcttcctggtcacctacgaagcaagttcattacttgagagactatgcatctagtgtggagatcaatcaattataactgaaaatatacaatgaattttagtttgtaatatgtgaaaacatacttttgaattttgtggcacatgcttatgtttatggacatgcacatatctatgagttggaaaattctaacttttacttaggctcctttgggcactttagtacaaactaataatgtttagagatagataaggaagaatacaattgtcatgaacatatctttgaatgcttttacttataaaaatattctatagtatacatgtgttgaaatgcatacataaaaccctctatgcactgcaagcaaaatgcttgctagttactgttaataaataagtagatattaatttcctgttttcctaggaatatcccaagcaaaattctttaaaagtgttctctctgcttgagctacattctcttctggagtttagcctgtgctctttgcctcacatagttagtactctacaattagaaatatttctctctgtctccttgtgagtatgtggtttttacttaggaagtagtcattcccttccctccccaacttcccctcacccctggtccatgaaactctaaatttgggagggactttcatggtcacctattccagtccctcagggtttaattatgataaggctcaaataggtcacagctagttagtggctgagaaccagttgtcccaatacctggcctttgacgtctgtttcagttgtagatatcatgttgtcttctcagtgttactttctaaaagactcatctcttgggcattttaaacatgctgctattaaatcaatctattctttgcatgatatgtttgcatgatccagagtgaagcaaatccagagctattcacttaagatcacctgagacctggagtatatctggcttctcgataaattgtatgatctgtgtttaacttggtattttgtccacaggctaaccatgactatatcttttagtttagaagtgctctgaagataaaatatttgatagcatagcttctctactggtttagtgtagtttaaaatgcaaaccatgtatgatttcatgcaatttaagtaaaaactctaatttgtaaaggaagattgcactgcttgtgagggcatgggttggaatactttaaaaatagtacatctaaaatatgcctttatattatttatacttaacagatttacttaaattacttgaagctctcaaagcaatttaagagttggaactagaagaacaggtttccatcacagactagaataaacagaactgctctctattagccattcagtgtttctccccagcagtatatgggttatatagtcctgggttcactgttgtctaaagcagtgttgccaagaactacatttaaatacttcttttggcccatcaaacatggtgctctttcagtgcaatcacagacttccaccccatctccctcagttccaatgaaccaaatagttatttggtatgaaggtctaaaaattgtatggttatgatagttcaggatgacaaattggaacaatcattaaaaaaattacataagcagagttaaagttcatttaagcaaaaaaaaaaaattgttttgttcgtgctatttagattgggtagattccaaaatcactggacagtttttgatattactataatcaactgtggcaaagcctgaatagctttcaagttttgggtttgtttttcttcttttacttatagacaggatatattacaattgaaacatacttattagaatgacatagtaaatgcaatggctgttttaatatgtggttagataatcaacattatgaaaggactctatttggcatgcatatagcccaggatttcttttaaatataaatatcctggagaatttggataaaattctcatctgttgttattgaacagtgagccacattcattcttcccataccatgaacaagcttagagaacgtgatacgggagggaatcatgcttggagctattgtttactctattagttgttttgagtttttaaaattaaatattgagtagatttagaagaatgtttgtaaagtatgtatagagtataaagaacgttatcgttacctctgaaatttcttatgtgtcgttccctgatcctatagccttctttttcctttgagaaagctccatactagattttatgtttggcttttctttacagctttatcacatatgcttaatcattttgtgtgtttttaactttatccatatggaattttactacacttcctcccatgacttctttttgttcagtattatattccagtgcttcatccatgttattgcttgtagctgcaatttattgactttcaaagctaaacatattctattacattaatataccataatttctaatatctgtgttactctagatagacatttgggttgtttccactatttattattgacagtgctgctgtgaacacttactgtttgttgctggtttaaaggtatttagttttgattgggtttactaatatctaaaggaatgttcacatctgtgttaatgagtgtatttgcatgtaattttcctatttttcagtgcatttttggatttttgcaccaaggttatttttgcttcataaaatgatgcatcttttcttttcctttgctataatctgaaatagtttgtgtaaaactggaattatttgcatgttttaatatttggcagagcgtgcctgtaaaatcatcttaggtgttctctttgtgagaagatcttaaactactaagttaaattttaaaaatgttacaggattattcagtttttcaatttcttttttttttttgagatggagtcttggctggagtgcagtggtgctatctgggcgcactgcaacctctgcctccctggctcaagaggttctcctgcctcagcctctagagtagctgggattacaagcgcacactaccacacctgggtaattttttttgcatttttagaagagacagagtttcaccatgttggctgggctggtctcgaactcctgacctcaagtgatcctcccactttggcatcccaaagtgctggaattacaggcattagccaccatgcccggccccagtttttccatttcttaactcagttttagtaggttacacttttctagaaagttgtccattctgtttatgtttgaagtttggtggcataatatcctctcactttttaaggatatattcatgatgccctctttattctctgtagtgcctgtagctgtttcctctttcttgtttgcttgtgcctcctctcttgtttccttgatgaattttatcaacttcctcttttctttttttttttttctggagacgaagtttcactcttattacccaagctggaatgcaatggcgcgatcttggctcactgcaacttctgcctcccaggttcaagcgattctcctgcctcagccttctgagtagctgggattacaggcatgcgccaccatgcccggctaattttgtatttttagcagagacaacgtttctccatgttggtcaggctggtctcaaactcctgacctcaggtgatccacccgccttggcctcccaaagtgctgggattataggcatgagccatcgtgcctggccttatcaactccttaaaaaaacacagatttggactggggagattattgtatatttgttttctattatgttaatttctgatgttttaaaaattgtctttcttctattttcttgggctttatttcgctggctttgttttctcatctctccaggtagatgcttagctcattgtgatgattttaaagcacttgcaaattctttaacattctttccttcaaaaaatggagtcaaattttcctccacttgaatgttggccagacatagtgacttcttatgaacagcctgtggcagaagtgatggtatgtgactttcaagaataggtcaccaaaaagaatcatttctgcctgactttctcttggatcacttatttgggagaacctagtcgtcacgtgagaatacatgagcgtccctctggagaggcccatgtagagaagacaaccatgtgagtaaacttcctgggaagtggatgcttctattctgtcaaaccttcaaacgattgcagctttggccaacatgtgactgcagcttcatgagagacctcaagccagaactatccagccaagctatttttgaattcctgacccataaaaactatgagagataataaatatttgttgtttcaagccactaactttaggggtaatttgttttacagcactagaaagctaatatactcattagtcatcggccatttttctgctctaatacaagcatttaaatgctatagatttctctctacattagctgaatctcacaagtttggatatgcaggatcatttggatttaaatattttctgatttctattattattatttttaacttacgagttacttagaattgtgtttcttaatttccaaatatatactctatgtcaattattgatttctagcttaattgcactgtggacagaaaatctgatttgtatgatatcgtcctttaaaatttgctacaccttgctttgtgtccctgcatatggtcaatttttataaaagctcataggcccttgaaaacaatatatattctatagccttatatgtccattagcttaggtgtgttaatagtgtcattcaaatctatatccttacttttgtttttatttatttatttattttctgtagacctcctctgtggattttttgctatgctaaatttttcagttattgagagaagtacattcaaatctgccactgtgatgattgactgattttactatttgcatttctattgttgaattatatgttttgagttatatatgtatatatacacatctacacatgtatatgtgtgtatatataagcacacacatatacatacacatatatatgtaatgttactagatagattcatgcttagaattatatcttcctagtgaattaaatttttatcattatgaaatggcacattttattgctattaatgctatttgccttaaagtttaaaaacatctgacagtctttaaatgatgtgtatcatttaagagatgtttatcacttaaatggtacatatacatcatttaaaggatatatcatcatcgttaaatgagcatttagtttttttacatgtgttataattactcatatttttgtttgtaaatttactatcttactttgtgttttctacatatcccaccttttctgtttcctttcttctactttcttgacttctggattgattattattaaaactttattattagcaataataataaacacaatatattttatattctatttttatttcgtatattctatttttattttgttagtgggtatcctagaaattttaacttgcagaacttatcaaagccaaagattaatcaacatccttaagtttctctcaaaaaatatagataacttagaatgctttagctcctttaacacccctctccacttataggttgttgtggacttaaactttaattacatttttcaatttttaaccaatcaatatattattattgctgttttataaaattgtaatatttactgcatttttaccactgtagaggaggaaaaacttttactatactctcttaggttctgctggaatcggtgaattaagctgataaaagacagattaacaggaggaaagcatacacattttatttaatgtcattatttacatggcaaaaggggtttcacagaaaacaaagagaaaatttccaaagaagcagttagacttgggggcttatataccaatttaacaaaagtaataaattgtggagaagtggctcaacaaaggaaagagatttgagttcctaagagtgcaaaattgtgggaaaatgggaactctgggcaatctagtggaagataagggttattttactaaggtatatttgtgcagattcatcttggcattgactccttaactctggtgataagaatattctcttcttcctggtaccaggagggcacgtttctcatggaaaatttatgccttgcttttaagcaaaaaggacaagggcggggagctcttcttgcatctgttgtttctcaattgcctttggctcaaaataatcaatatgccaatgcagtatattctgagatggcatgttctgatctccttcactgctttttttgctcataattttttcttgcatctcagactgtccatctggaaacattttccttttgcctgaagtacatcttgtagaattttctttaagtttgttcaaaagatgtttctaatctttttctcagtttttgtttatctcattctctcatgagaaaatgtctttatctcattcgtattcttgaaagatactttcactgcatatgaaattttggtgcagcaattattttcctgtcaccacattgaatattttgtttcatgatcttctggcttccattactgaagttgaggaatatgctatcagcctaattcttgttcctttcaaggtaatttgattgctttctttcctatttttttctaaaaacatctttttttgtctttggtattctgcagtttcacaagaatgtgtcttacctacagatttcctatttatttatactgcttgaaatttgttggtcttcctgaatctgtgggttattgtttaagcaactttggaaaattctcagccattatttcctcttttcctctattccctgtctcttttcagaaatctgattacatgtacattagatagtctatcttcctcacctcttaacctttttttttttttaatttgatacagagtttccctcttgttgcccaagctggagtgcaatagcacgatcttggcttactgcaacctccacctcctgggttcaagcgattctcctgtctcagcctcccaagttgctaggattacaggggtataccaccatgcccagctaattttttgtatttttagtagagatggggtttcaccatgttggtcaggctggtctcgaactcctaacctcaagtgatctacctgcctcagcctcccaaaatgctggcattacaggcgtgagccttcatgcccagcctacttgttaacttttaattttatattttctatcttttttctctctttttttttccctgaacagtttctgtgctctgtcattcagttctctacttctctcttcatctatatttaatccattactaaccttatctacggagtttaaattttaatttttttatttttcatttctattaattattttcgttctttttctaatctggtcatttaaaataatctctttttacttatatttccaatttttaaaaatatttttaaacatgtcaaacaatatattttatattccgtgtttgctaattttaatatccaagatccctgtgggttgtattctgctgttatttgtgctggctcttactcatggtaccttattaacttgcttattttgtgatttttttgatgatgagttcatatttcactgaagccagttgaaggtgagttcctgagaggatttgtgtttcctcttactagatgcttgaggacactaccagatatttggaccatgtagctaatgtgcatttaggccataaagattgtggggacatccttctgattatgatttctcaagagaaatatttatctctttcactcaatgcctaggtttgagacagacaattttccttagaatgggctaagaccgtgtgtatgtgggtggtttctgcaatttaatttggcacattatatgcattggttctttgattctggtattcagcatcctgggaggctagaaaaaggtagcttaaggtcactaggttctatcagtgtcttcaaagtgaaaactagcttcaagacttgccttatgtttttgggttttgtattagtttgctagggctgttgtaacaaaacacctcaaacttagtgacttaaacaccagaagtgtattgtctcaaagttcaaaatccagatgatggcagggttggttccttctgagggcaatgagaaaaggatccattccaggcttctctccttggcttatataagcatcactctgatccatgccttcatcctcccatgacattttccctatgtatgtgtctgtgtccacattttcctcttttttttttttttttttttttttttttgagatagagttttgatcttgtaacccaggctggagtgtaatgacatgatctcagctcattgcaccctccacctcccaggttcaagtgattctccagcctcagcctcccaagcagctgggattacaggcacacaccaccatgcttggctaatttttgtatttttagtagagacggggtttcaccatgttggccaggctagtcttgaactcctgacctcaggtgatttgcccaccttggcctcccaaaatactgggattacaggcatgagccactgcacccagctagcacattttcctcttttataaggacaccagtcatattggattgggggcttatcctattccagaatgatctcatctaaactaattacatatgcaatgaccgtatttccaaacaaggacactttctgagatttgggggaatcaagatttcaacgtatgaatttggggggtatacaattcaatctataacaggtcttacgttgttgccagttcattgaggtattcaaaagaacttttggaagtgcaatttatccactatgtcttttcttcagtaagagggttggttacggtatagagtatgctatgctgctgaacaccataggtttttgcatggtgttaacaaaaattgtatgatgttgaaaagttaactgtcactaaggcagttttacaaaggctgcttccatctttggagcaaccattcattttgcagctctgtcgcattatccttgaggttctgaggctgcacatttaccaccttgaccttgcgggaaatgactcaaaagccaccttcttgggctatatatttgccaccttgacagcgggggaaatgactcaaaagctaaacctgacgttcagaactttttcgagttgtagagccattttagggatccatgtttcagtcaactctgttgaatgctcccggcaactatagcacatatcaatcataacaataataaacaaacctcagtcatcaagagtaaattatatcctacgtgttatgtgttagatgatagagaaatgtggaatacattttaggaagctttctatcaaagagagtttaaacctttcccatgtataaaggattagctcttagctctgaagactttgcttaatcagaagatattactcatttaaggttatttaaagataaaaacttttagcatattgtaatctatcaaccactgcttctgaatgacttggtgtggaatcagagttggggggaagagacttttaaaatttcagagtccctggcattattccagacctacgaattagaatctctgaggaaaggagcccagaaacgtacattttaaacagcatcccttcagagttagagaatcgttgttgcctagggtcttccttttaaacataaggtattttgcttcagcaacttaatttttatttttctcaaattgtattactggtaaagattcatgatttttataatatgaatttaatgtttgaagtgatattcaacagcacaataaaaaagtggtgaatggtgggccgagcgcagtggctcacgcccgtaatcctagcacgttgggaggccaaggtgggtgggtcatttgaggtcaggagtttgagactagcctggccaacatggtgaaaacccatctctactaaaaatacaaaaattagccgggcatggtggcgcacaactgtaatcccagctactcaggaggctgaggcaggagaatcgcttgaacatgggaggtggagttgcagtgagccgagatggagccactgcactccggcttgggaaacagagtgaaactctgtctcaaaaaaaaaaaaagtagtgaatgcaaataaaagtagtgaatggtcacaatgtgcttagcaattgtaagataaaattaaactctttataatattttagtgagaggaccacaactagactcttcatgggatttcctttttgaaaataatcctgaatctaatagcaagcacaactgagatacattttctttactgagttttgcatttccagtgtgaccctttcgctttttatactggacgatctaattttacgtaagagctcactctggtaagctgtaccgtgtgtaggtgtacatggatgatctccactagtaagataaaatacctctcttctcttctacttttatccccttcttctgtccaagtgagaggcaatgtaccacctttcccttagacatgaccataaaatcccagaggaaagcaatatgcctaaaattatttagtctgtttcccttgcttgaatatgcactggaattccctggcctggggtgggtcctaagaatttgcatttctgacatgttctcaggtaatgctgatgctgatactactggcctggggaccctacttggaaagccactgtattaactcatttaatcctcacagcagtcctgtgaggtaggcactattattgtcatcatgcccattttatagacgagggttctggggcagctggtaagacagctggtgatcaggacaagattttaaagccaagcaggccgacttcaagcccgtgttctaaactactgtaccatgtgtcttctcagtcagcaggtacttattaaacgcatactgtgtgccctgtgtttgactagctgatattttaaaaaaaatctaatctcattccttattcaggaacagatgatttgaggatactcacttcctactgaacttgacatggataatttcttgatatctacttgagagggacatgagctgctacatcaattgaaactcaggtgacaattgagatgcagaagttaagtcttttctctgcttttaaacatgaagttgtgccttaacccaaaagggtgttcctgtggtaaactgtgtactctataaatgttctccaaagctagaattttcttggtttatgcaaatgtacagctgagaataattttgtgggatatgttgcaggggtggggttgaaaaattcatggtacttatctattaccagttctttgtgttttaagtacttagcctttatttttttttcctttcagcattttcttttgttaactggattcccatactggctgttgctgagggggttggggaagtcctgatctgacctgaattttttaaaacaattttttagcattttcttttggagaccacaaatcatattgcaagtcaacaacgtctgggtgttagtgggacatttctattttaagaggcttagaaaaggaggtaaaaaagaaggaagttggaagttaggaaggagcaatgaaagcaaagcacccattttcacatcttaccagacaaagcccctccctgccaagttcctttctggtgggagatcagggcatggctcatgcaatcaccagctaagaaaggaactgagacttctcttcatttgttgttttttccttccccacctttccctagaaactattagactgccacactgtcccgttgtgtgacacgggacactttaagtgacggggtagacaaaagctggaacaaaagagcctctattaaggtaagggtctactgtgtccagaacattgtcttagatgctgggggcaaaacaaaccgaaaacacagtcattgcttataaaccaaactcaatttgtaaggctatcccactcagttaacagaggagagtttgaggatgatttcctcctgactttccaggataagtggaataaaagaaatagaaaatagatcaggaacatcattttgcctcattccatctcactttaagtgaactcgggcccaagcccaagtggttctgttccaggaaacacggtgggtcaagcaggatgtaaccttatcacacaccttagccattgtcctttccttcttaaatccctagtgaggaggataacagttgaagatatctttctttttttcttctccaggctttaggatatcagattaggtattttcaagttgagaacaaaaagccttaccacaaagttgtattctccttgtgccaataataatgagtcattcttgctaagaacataggtggtttgtatctttctagtgcttcttgtcagaagaagcttaacatgcacagagggagatatttttcctggcacaatagaccctagtcacaaaccacaaagttttgcaataaggctattcgttaagtgaatgcaatattatagctgagacacttttggggtgtgtgtgtgtgtgtgtttgtgtgtaggggtgtgtgtgtgtgagagagagagagagagagaccgagagagagtgtctgtgtgtgatgggggctatacctcagcttcctgtttggccttgctgatgtcaccgcattagtatcggtactgcacttcagatttttgtacagatgtaagtcatcatatttagtatttgactttaaaatgaattggtttttgcacatctgtgctcataaatgaataacaatagaagggggaagaaattttgaattttgattagatgaaaggggtgcaaaacttccactctttctttcatagataccttgcaagccaaaagctttctagaattgctaggtgaagttctaaatatcactaattttgagataggctgattgacatttatgattgggtttggtcaggatgaagggtagtgaaattaccagcatagatgagtgagttgccattggtctaaattttgccatctctggttttcttctgatttctagttccatatttggtggctttaaatgaacacagtactgttctcttcataccatgtatattttttaccaggtcaggaatctaagaaacttatgatctaatttagatgtctctggaaatgtgaatttcataacttaagagaagggaacagatttgaaattgaaatattattatagggagctgacagttgggttaagtggattgttacacattatcatcttaaaattacatttcgtgtcttcttaactttcctccaaagaacacatcctagaattataacactattttcaattccctctgcatctttcagcccttagaactaaatcctaagccaatagctcacttttggactcctaaatttgattttctgaaggccttaggttaaatgtcatttccaccagaacacctttcttaatctttcaggtaggtgaaagccccacaattttcttctatctgtccattcatctgtccttccttctctcgtacctgtccttacttccatcacagttctaatcacatcatgtcatcattgactatttatttatctgactcctaaaactaggagttcctagaagccaagtctatgcccatctactattacatctcagccattagtactgagtgtaggggtgtagtaagcacatactcatttttttttaactgaataaaggagcatgggaagtaggtcatcatttgaaaaagcatctggaaatgataagaatagttaataaagcattccggattgtttaggagaaaggtctattttacttgttaacagcaaaggcaatttctttggaagattttgctttcttttttgactatctgtgcagttacttgtttatttttcattttccatcagctttacaactttttttctcatgctcctcatcgcctactatcatttgtgtttaagccttcctttacataaaacagtatttttggcttattatttggatgattaatgaaaatcaatcttagcagttagatttctgactgagactgaccagacaaagtgaaatgtgttgcatgatgccattatttaagtcactgttttgttggctgtgacccattaagcatcctttctttttgtttaaaaattattttttttcagcttgttttagatttgggggtacgtgtgcagatttgttacattggtatactgtgtgatgctgaggtttggggtatgaatggtctcgttacccaagtactgagcatagtatacaatagttaggtttttcaactctgtacccttcccccacctctatagtcccgtgtattgttgccatctatatgtccattggtactcaatgtgtggctcccacttataagtgagaacatgaggtatttggttttctgctcctgtgttaatttgcttataatggccttcagcttcctccatgttgctacaaaggacatgattttgttctttttttaatagctgtgtagtatcccattgtgtatatataccacattttctttgcccagcccactgttgatgggcaccaaggctgattccagactgctttccacagtggctgaactaacttacattcctatctaccatgtataagcattcccttttctctgcacctcaccagcatctgttattttttgactttttagtaatagccattctgactggtgtgagatggtatcacattgtgattttgatttgcatttctctgatgattagtgatactgagcattctttttttttttttttttgacctctttagttttatattgtttcagctaaaacctgtgatgaggtcattcttagtgaactacttataactagttagttcttataaatgctgccaatgttttttttttcttttattattattatactttaagttttagggtacatatgcattcttaaaatatgtttgttggccgtttgtatgtcttcttctgagaattgtctattcatgtcttttgcccatttttaatgcgattatttgttttttgcttgttcaattaagttccttaaaggttctgaatattagacctttgttagatgtctagtttgtgaataaaatattattttttaatgcatctattttcattttacgtatttttttttacagtcaccttggtgactgtaacacttaccatcacttttgaagaagtgacttaacaaaagaacccaaacaacatttcttcacctctgcagactcttcctctcacaatgaagtggcttccgttactggaataatgtcagggaagataacagcttcctctaaattcaccctattcaaatgtgtaattcacacttgttcacagactagaataatgtacctataaagtgtttattggctgttatatagctcctagaggaagaaaataaaaatgaaatggtttgtacgttatagtttgtcagaagtatgattgccaattataatgataaaatactaatgatagctcacattgctaatatttattgagcacttaccgtgtgccaagcactgtgtgaaggctgacaacaatccttttagttaaatagcattattgtccgtaggaaaccaagatttagatagctaaaggagattgcctagaggtaggcagttatcaagtggtggactcagaattcaatcctgaatgtttaactccaaagctcaagctcgtaattgttgtgtattaaagagcctgacaactaaaggattatatattcagtttctcctgctacatttgaagagggattttagaaagtaacaatactagcaaccaattattgaatgccaggtaatacactgagtgtttaatgtatgctctttcgatccctatgacaatactaaggaggaacaaattttatctccatttttcagatgacactgaggttcatggaaattaagaagtatatttaaagtcacaaagctatttaaggtcacaatagctaattaagctattaaaccaatgaatacctagatctctgctcttactgcttattgctggtcatactagagtatgtccagtgcttgaatagtaagaggtctggcaaccaggtcatatgactgagaaaactgggttatgtttaacctgacagtggttgaagggaggaaaaaaatcttcaaatatcttttgtcacgtagaggaaggatcagacatattttgttttgctccagaaggtaaaagtgtctcttgtaaatgtaggcaatctagattctgaaattgcaattgcagttgcttgcttctgggaattttatttaattgaaaatagaaattgaatctgtaaaccaaaaatacataaacaaacaaacaaaaaaaactaatttgaactcagttaaagtccccaggtggcatctattacatgcatcttctgaagacaccgttgcatttttattgtattagaagaaacaacatttccagaatatcagaggtgaagcctcaagtcagttctgtgtctgccagaataaaaacaaaaataaacttatctttcttcttgttgtcctaagaataaggtatcagtagttccagaggaagataagaccaactgagagtgtgggaaagagaataaccttagtgttcaaagcttcatagggcagagaacattggacaggtcaactagtaatgcctaccacatcgtgtggtgatgaggagggagagaatgaactgctacacgtgaggttctcagaactcttttaaggaggacgtaatgttaaactaataaaacctggtgagaaacaacacacaggggtgcctccggaggctggagggtgggaaaaaggagaggatcagaaaacataaataccagatactgggcttaatacctgggtgatgaaataatctgtacaacaaacacctatgacacaagtttacctgtgtaacaacctgcacttttacccctgaacttaaaataaaagttattaaaaaaaaaaaagaaaagaaaaactgtgggatagcttggctatacaattatcaatattctgatattttccaattaatgctgctgtttctcatatgaccacaaaagggagatttgtttcttttctgtgtttgagatgggcatatggaattctttaaaaacaaaaaggggaaataccaagaaataaaatcaggcaactgaagatatgccttctgccatggaagctcaaaattttaggatctttcaagttcttcatttgcacctgggacttcagatgcttggtattgctaaaaaatgtgttcattttctatttcaaataaatatggagataattattttaacaaaacaaaacaaaaacctggtaagagggctgagcatggtggcataccactgtagtcccagctgctctcgaagctgaggcaggaggatcgcttgagcccaggaattcaaggctgtactgcacaatgattgcgcctgtgaatagccacagcactccagcctgggcaacatagtgagatctcaccttaaaaaaaaaaaagtatgaaaaacctgttgagaaatggagcatcgactaggaagctgacctgaggaggatcaagagacccagtgttagctagccacttccatcacgggacagtggctgctgttaaccgggcagggggagcattcggagataaacaagggaaggtctgcaggtgccagggaaggtctgcgggcgatttttctaatatgtactttggcatggtctaatgttgactttttgcaaggaaaaggccaggtcaatcttattgttctttcctttctttgaactgtggaataatagtgagtgcccttgaacctgtggagaaaaggatagaaaatttgtttttctttcacataaaaggacattggggcatgccttagtccctagctgacagtactagtcactgtgcaggggaagatggctttctggagcacactaattccacttcagaacacagagcaagattaattatgaagaactgataactccctacctccctacttccctccctccttctctctcttcttccctcccttcttctttccttctttcctccctccctcctttcttctttcctcccttcctccctccccttctccttctctccttttccccttccttccttctttccttccctcactccttccctccctcccttcctccttccttccttccttttccttctccttttctctttccttccttcattctcctttccttccttccttccctccttccttccctccttccttccttctctccttctttcccttcctccctcccttcctcccttcctccctcctcttccccccttcctgtcttctttcctcttgtcccttccttctgccaacaaatacttatcagcaccttttgtatgctgagcccttgctaagtgctgacagtccagtgctatagaaaacagacatgatccctgccttcttagaagttacaaactagtaataataaagaaaaaaatatttaattacaaattgagatacgtgtgtaaaggatgcaccaagaaattataagagggacttgatttagattggttcaaggaaaggaatctgtgaacgtggcaaattagccctgaagaacatatggtctggagcaagagctggcaagtctggctgccacctgtttgtgtgtggaacacagccacaccatttgcctaggtattttgggctgcttctgcaatagaatggcagagttgactagtggcaacagagactgaatggctcacaaagcctacaatgtttactattttgccttttacagaaaaagtttgctgacccctggtctagaaaatacttgaaaataagagctacaatatttcatttgatccatgccttttcaggtagggtgggccgtggactttgtatgactgaaacatgtgtgggcacaaattacttgggtgtgataatgtgtgtctcatcatgaagtagactctaagcagacaagaaactttctccaaaacttgagattgcatatttcaaatgaatttcctgtttgtggaaagaggtattatggtgtggtgtttgtaagcttagtatttggaatttgattttgaaagactattttggattcagatcttggctccaccacttaggatctgtgttactcactctcattactcttcaattttctcatcagtgggacagaggtattgtcagtgcccattcatatagttattgtgaaaattacctgagataatgaaaagacagtacttagtacaatgactgacatacagtaaatacttaatatatatacactgttaggatttttaagatacaaaatattttcataaaataacacatcaatttttgtgatgctactccataaataatattcagtttttgttttttatcctaatagaacaatttttttcacaatgtctgaggataaataaaagcaatgacttctaagtcacaattatacaatttttggaagctaattttataatattttgaatttttttgcatgtttacaaaattaatttttgttttactctggaagtttgaggtagatctgcccccgtctccctggccccccgcccccgccgcagtgctatatttagcatgcttcctcccacctgcctacagctttgcataccctaaaatgcccattaaactccttttcattccttctgtctacagtctgggcctatattagtcctatggctttgattccaaccccactcacaccatagttctctggttcattttcagctagttcatgagtgggtctattcttccagccttttcttactttccctttgtggtctacggtccttgcatggacatgaccacttcccaatgcctccccacagtccttcgttccctgaagttctggctttggttccactttcccatggctctgacttgcaggagtgcttggttgtaggctaactgccttgcacacaccctcatcagctgtccgctttcctgatgcagacctcagctccttgctgagcaatggcatcctcaccatgctgcccatgaaacccccacccagcccttcccttaaaatatctactgggtagccaccagtcactcacagtaatctggtgagcatggcagagcgaaccagcaaggcacagcagataggactgcttatataccataatgatgacttcatagcaccatgaaaataagcactggcctagttacctggtcaagaaaaaaaaaatcagaactcttacaacagaaatcaggtagtgggatatattctgcttctgctttcagatcctttttggtttgtttccattggctacatggttactggggaaatacagatcaaacttgtgttctctgaacccagtgacacggaaagcagaggtatcaaataatgatgccagagctggaaagtaccttagagatcctatgtcccactgccatcattgtggtagataaggacacagggaggttgagcactttacccaggatcacatggaagaaatgtgatattgatcaacgtgggtaggctgaggatgtatttgctggacagatgtattccactgcccagcaaatgattgagccaaataatgaatgaaaggaccaaataattccttgagtcaaatattcttccctttgttttacattattttaaaacctcatatatatatatttatttatttatttaaaaccgcacatatatatacatacacacaattttatataaatgcataaattggatcatatcataaatgttagggtttttctttttttgcttctcttttcattcttttaattcctccatagaggaattagaactcctgtaggaattaaaattcctgtatgtatctttccatatttttctcaatatacctacatatattataggggtttttggtcactgttttttgttttttgtttttttaaggtgaccatgtgatacacttttctctatttttctttttttcactcaacagggtctcatggaaatccctccaagtcaattgatactgttttaactcctttattagcagctatataatattctgtggtttgcaccctacatgattcaaccattctcttcctgatggcctttactctgttcccaggtttaccactatcacccatgattaaatacgtgtccttgtacatatatcctcatgttcttatttctatgaggcagtgcccgtgaagagagattgctgggtaaatgtatttttaacttaatagatgttgccagattaattttctgatagactataaaatttcatatttctacagtgtatgagagtgccctttttccagcagccctgccaatcataggtatttcggctcttgctttgtttttttttgacaagctgatggataagaagtgaatttgctttttattttgagtggcctttcccggattggccatgagtctgagatcttatctcatgtttatcagccatttagatgcactttcatgtgaattgtccgttgatgttctttgccattttcattttcattcatttattcattctttttcttcttcttccttttgttttgtaatattcttgtaagaactctgaacatttagatattaaccctttttatatcttttcattgtcattcattccttccttctttttcttgttctcttgttggtaattttcttataagaactctgaacatttagatattaactcttttttatatctccattaaaaatgtttttctcaaattcattgctcatgtgttattataaactaattatgttattattaacctttaattatgatatattttgccatgcaaaggtgtctatttttatgcagtcaaatatattaatctttatttttatggcttttggattttctgcctgtgtttagaagattccccttaacccaagattatatttctaatttcctcaatttttcttgaaggttttatattgctattttttttttaacatttgagtttccagtctgtgtggaaatcatgtttatatatgatgtatatgagtggtctaacattttccctttaaatggaaaatcagttgcgccagcaccatttattaaataatctaaccttcccactgaattaagctacaatttttgccatatattaaaattatatatatacacacatatacatatgaaaagagaaaagaatacctagataacctcaagacacatatgtatatgtatatctatttgtttattctcatgttaatgcaattttaatttgattgcagatttttgttgcatattctttaataagaacattttccacttacaattcagtcgtataatacttttcttgatcattttaggcatatattctcattgtgaatttacattcattgtagctaattattccctaatgcctgctgggtttctaattacaatcaatttataaattattttagaaaatattattaaatgtttacatgtcatattcaatgggggatccaaaacattcattttgaaggcccactcacactcacgggaatagattaaatgttgtagtgtgcttttcccatctgtactaagctcaaggctgccattaggacacagcaaaggagaagaaggaaggtcactggaagctagagaactcaccaagtgcaggctctgtccttaggcctttgttcatggtgtcttgccttacacaatagcatcttgatcccagttaggaagcccctaagccttgcagactccagaacccatcaccttgcactctatctgttggaaggctttataaccacatagttttatgtctgcacctaatataaattaagaactctttctaggataggcttgaagatttcataggttgggtgtttgaaaaaggaaatgctgtgtgatgaggacactgtgctctgtggctttcctctgtgctttgggtcacgctcttcctttgccttgagaacctgccacctgccacagttcagcccacccatgtctacttagctccctgttccatgaaaacatccatattccaaaccagactcccatggcccattgctttcactagtagcatttatcacactcgctgttgtgttacagatcattatgccttctttcgccaaacacttaccaggcacctgccttgtgattgttcagagtgccggggatccaatggggaacaggtggtggatttattattctttcccactcaaactttatgcccatgaaccaaatcttgttcccttatattcagagaatccctcacagtgactcatacatagaatatgttcaaccagtgttaggggagtgagtgaatatataataatgattaggtgataggaggaataatttggttgaattatgattttctcatttctgcatcaattagttatcaccttttttccagcttaaaatttttccccatgttttgaatgtgtcacctttgttgctttcttcctaaatgtccatggtcaaattttcaaagtttgccagaatgaatttttcattaaataaataaagattttttagaacccttactgtatgttaggtactacaataagcattagggagaaaataccgatcaaaaatagacccatatgaataagattgccattttacaaaatgaaaactgggtcatttttctccagaaggcatgtaggcacaatattttaaaaatctaagcccacaaaatctgacttataaaacaaataatgatgtcaatcaggagcctaaaatagatttgatatttaatacttatatttaaattgagaagtgggtgaacatgattgaacattctagacttgtggattcagcatttataactagaaaaatatgggaataagtcagaagtaatcagtatccccaatctttgatactgaagaataacactttttaaagagcagtattactacgtaacccatttgctttcatttatattgtaacacaataaatgtttatttttagtttagacgtgtacttttgtcttgctcaatgtacttaccaatcggctagaaacatgggtctagatgaatacttatacattaatttaagcttaattagaaactggtaatctacactgatcagatctacattcatttattcaacaaatatttattgagtatatagtgtgtgccaagttctattctaggttctcaggatacagcaatgagcaaaacaaagatgcctgttcttgtgacacttatattctagttcggggccaatggtggaaacagaaaatagaccatgaacacagtaaagaaattatgtagcatgatagaatgtagcaagtgctgtggaaaaatagtagagtggactaaggggatccaggagtgctggggttgaagggggagaggtcaggcaacatataaaataaattgtattagagaagcacagaattagagagaactatgcccagcctagaactgaagagaaatgtggagatagagaatgctatcagagagattaaaaaaaaaataagtatgggattaacaaacaaaacctataaggaatactagcaataattgtatcattcagcttgaaagaaaagctctgggaagacacgatagtgatttttcaatgttattttattcaatgttatgcccagctactaaggatgctacctgtagaaatgttcttgattgtaacgtaaacccacactatttaataaacattagctttttacagttgttaataattataattggtctggaatattttatatgctgttacaactatttaataactagtaactagttacaactatttaataaataaatattgccttattcgtagggaaatggattggacatttaaagtccattttagttctatgattccatcatgccttccacaatcacaaaatgcaattaggatctatgaatgcccaagagggatttacttacttatcattaacacaccaacataggaaatgtgcacacacacatacacactcattcctgcaaaagctttgacatttctgacacaagaattgaggttttgtttttatttcctcttttttctattttactataagggaattagatcattggaccaattctttcaaatagttccatggattgagttaattacaatacgtgatccaagtctgtacccactattgagattgtctacaatagaaacagggggcatctaaatccatcaagcattttagctgttggttctttttggtggaaagtagaggcagggtgaacaatctgttactataaatatagtggattgttgcaaggctgtatcctgtttggaaatgatctcatctgtctgttgctggttagcagttttctaccaaactgagcaggaatattaccatatggcattgttgttagagagccctcaaagttaaagccacaaggattcctcattgcccatgaggtagggtttatgagtgagatataattgtcaagggtcttgaatttgaactaaccttaatccacatagggacttgttacaagtttattttattccttaattttgtgcattattccgatcctgggattgttctattggataagctgtgctatgtatgtaattgatgaattatagaaaaagtcaagtttctcccttctttattgatataaaacagatccctttgtaatgaggctgtttgaacatgggcaggtgtgcagtggcatgctctctttcattgcctcctcctctgccccaactcaaataaacaacatactcttaaaccacaagcatctagagtgtgctgtccaatatggcagccatagccccatgtggttaataatcacttaaaatgtcctgaatccaaactcaaatgtgctgtaggtataaaaggcacatcagatttcaaagacttagtactaaaaaaagaatgcaaaatatctcattaataatttttatattgatcacatatttcagatatttggggttaaataaaacattatcattaatcttacttgtgtctttttttgatatggctactataaaatttaaaattgcatacatggctttcattatatctcattatatgaaatgtatttcattatatttctcttgaatagcaccagtctagagtcttaatgggaaagcaaagagacttcccatttccctttctcttaccctgggagagggctttaagacaaagtattgattactttctacagcccagagaaagatgtgtgtgtttgtgtgtatgcacatgtgtatatgtgtatttttgtgtgtgcgcacaggtgtgtgtatgtatgtgtgtgtgttgagggtgggagaagattcagtgggaaggataaggagcatggaaagggaagaaaagtgagcattttcaaccagttggtctgagatgccatctactctcactggaagtaaggaacaaagaatagctgagcacaagttagttcttaaaaggcaaatttgctttttgttttaaaaataggatgaatcagtggaacatcagactcatttgaattcaaatgtaaatgcaaattaagcttccttaacatcagtacagaagcaaatatgaagttttaagaattattatcatcactttatccattgttagcaaggatagtcaagaactgacctgtattccattgtatagtcttgatttatacaaagggtatgatttattttgttctgaagcattttatgaaagaaaaatttctggttgagatagaatcacttaatgaccttacagtttatattcaaataaacacccgaaatagtaaggtagcttttctggataactggatgattttgtatatcacaatgcttttggtaaatggtaaattaaggggtttaggaagaacctactttttcaaataaaaagaaagatataagttaatgatgtaatatttcatagttttgctataatcttttcattgaccatgaaatggcaaatttgaatttttttatttgaatattttcactattttattaggttaattaattagatattccatgtggtaagtccaatggaaataaccatgaaatggactgttatttaggggagtagaaggggaaatgaggaggtcaaagagaccctagacaagcgctgtccaacagaaatataatgaaagacacatgccatttaatatcttccagtagccacattgatgcctttctgcagcccagagaaagatgagtgagagagagagacaggcagacggagagaaagagagaatgtttagcgggaagaaaaggagaaggtagccttgaagacggaactttatgtccctaagttgaactactatcatggaaagcaccaaccaaatgtcaatacaactgacggtactttcagttgatcatagaattacattgtttcatagctgagaaagcagacatgatggtcagccttccacttgaaatgagagattaggcccagagaagcaaagtaactcacctcgagtcacacaggagatgaagcagaagtggaaatagtggccagttttgattctcactagacactgtgctatggcctgaggatacagtgataaatatgacagtccttgtccataaggacattctagtgcagtggggcaccagtccatctgggtgtggcacagatgacatcacctatgacacaggcacacttgtgttgtcccctgaccatgcccagttttggtggcaagcaggggatagtaatattactttcaaggacattcgtgacaaacctcaaaagtgttccaggctgtaaggattttccctccattcctgaaaagcagaacatttgaaggaggcagtggagatctcttctgagtaaaccacaccaaacaatatctttcaggagaagaaaaaagaatgtcctcttcaattgacatcacactggagactgcttggtggactgggtcaggagctgggcttgagctctgcccgtcctaagggagagagaggctcacttccatgtgagtctctgctcaccgaagttctttacaaacaccttggattggaccccgcgtggtgggactgtggcgcgtgctgggctttggaagctgccagcgctcacgggagctctctgagattctaagaggcaaactgcccaggaccattttgactctggaaaggcaaatatcaaccatggtcataagaggattagttaaaaaaaaaaaaaaagtcgttagatcagcctgtatattcctaaggataattaacagtgtaacatttcataaactttgagccacaagtacaaaatcccccataactcaccttttatttcttatgcattcccttttcatcctcatgttttgcattacttaatcaggatatatatgtaatgtataatctggttctttttaaaattttttttttttaattttttttttttttattatactctaagttttagggtacatgtgcacattgtgcaggttagttacatatgtatacatgtgccatgctggtgcgctgcacccactaacgtgtcatctagcattaggtatatctccaatgctatccctcccccctcccccgaccccaccacagtccccaagtgtgatattccccttcctgtgtccatgtgatctcattgttcaattcccacctatgagtgagaatatgcggtgtttggttttttgttcttgcgatagtttactgagaatgatggtttccaatttcatccatgtccctacaaaggacatgaactcatcattttttatggctgcatagtattccatggtgtatatgtgccacattttcttaatccagtctatcattgttggacatttgggttggttccaagtctttgctattgtgaatagtgccgcaataaacatacgtgtgcatgtgtctttatagcagcatgatttatagtcatttgggtatatacccagtaatgggatggctgggtcaaattgtatttctagttctagatccctgaggaatcgccacactgacttccacaatggttgaactagtttacagtcccaccaacagtgtaaaagtgttcctatttctccacatcctctccagcacctgttgtttcctgactttttaatgattgccattctaactggtgtgagatgatatctcatagtggttttgatttgcatttctctgatggccagtgatgatgagcatttcttcatgtgttttttggctgcataaatgtcttcttttgagaagtgtctgttcatgtccttcgcccactttttgatggggttgtttgtttttttcttgtaaatttgtttgagttcattgtagattctggatattagccctttgtcagatgactaggttgtgaaaattttctcccatgttgtaggttgcctgttcactctgatggtagtttcttttgctgtgcagaagctctttagtttaattagatcccatttgtcaattttggcttttgttgccattgcttttggtgttttggacatgaagtccttgcccatgcctatgtcctgaatggtaatgcctaggttttcttctagggtttttatggttttaggtctaacgtttaaatctttaatccatcttgaattgatttttgtataaggtgtaaggaagggatccagtttcagctttctacatatggctagccagttttcccagcaccatttattaaatagggaatcctttccccattgcttgtttttctcaggtttgtcaaagatcagatagttgtagacatgcggcattatttctgagggctctgttctgttccattgatctatatctctgttttggtaccagtaccatgctgttttggttactgtagccttgtagtatagtttgaagtcaggtagtgtgatgcctccagctttgttcttttggcttaggattgacttggcgatgcgggctcttttttggttccatatgaactttaaagtagttttttccaattctgtgaagaaagtcattggtagcttgatggggatggcattgaatctgtaaattaccttgggcaatatggccattttcacgatattgattcttcctacccatgagcatggaatgttcttccatttgtttgtgtcctcttttatttccttgagcagtggtttgtagttctccttgaagaggtccttcacatcccttgtaagttggattcctaggtattttattctctttgaagcaattgtgaatgggagttcactcatgatttggctctctgtttgtctgttgttggtgtataagaatgcttgtgatttttgtacattgattttgtatcctgagactttgctgaagttgcttatcagcttaaggagattttgggctgagacgatggggttttctagataaacaatcatgtcgtctgcaaacagggacaatttgacttcctcttttcctaattgaataccctttatttccttctcctgcctgattgccctggccagaacttccaacactatgttgaataggagtggtgagagagggcatccctgtcttgtgccagttttcaaagggaatgcttccagtttttgcccattcagtatgatattggctgtgggtttgtcatagatagctcttattattttgaaatacgtcccattaatacctaatttattgagagtttttagcatgaagggttttgaattttgtcaaaggctttttctgcatctattgagataatcatgtggtttttgtctttggctctgtttatatgctggattacatttattgatttgtgtatattgaaccagcctttcatcccagggatgaagcccacttgatcatggtggataagctttttgatgtgctgctggattcggtttgccagtattttattgaggatttttgcatcaatgttcatcaaggatattggtctaaaattctcttttttggttgtgtctctgcccggctttggtatcaggatgatgctggcctcataaaatgagttagggaggattccctctttttctattgattggaatagtttcagaaggaatggtaccagttcctccttgtacctctggtagaattcggctgtgaatccatctggtcctggactctttttggttggtaaactattgattattgccacaatttcagagcctgttattggtctattcagagattcaacttcttcctggtttagtcttgggagagtgtatgtgtcgaggaatgtatccatttcttctagattttctagtttatttgcgtagaggtgtttgtagtattctctgatggtagtttgtatttctgtgggatcggtggtgatatcccctttatcattttttattgtgtctatttgattcttctctctttttttctttattagtcttgctagcggtctatcaattttgttgatcctttcaaaaaaccagctcctggattcattgattttttgaagggttttttgtgtctctatttccttcagttctgctctgattttagttatttcttgccttctgctagcttttgaatgtgtttgctcttgcttttctagttcttttaattgtgatgttagggtgtcaattttggatctttcctactttctcttgtaggcatttagtgctataaatttccctctacacactgctttgaatgcgtcccagagattctggtatgtggtgtctttgttctcgttggtttcaaagaacatctttatttttgccttcatttcgttatgtacccagtagtcattcaggagcaggttgttcagtttccatgtagttgagcggctttgagtgagattcttaatcctgagttctagtttgattgcactgtggtctgagagatagtttgttataatttctgttcttttacatttgctgaggagagctttacttccaactatgtggtcaattttggaataggtgtggtgtggtgctgaaaaaaatgtatattctgttgatttggggtggagagttctgtagatgtctattaggtccacttggtgcagagctgagttcaattcctgggtatccttgttgactttctgtctcgttgatctgtctaatgttgacagtggggtgttaaagtctcccattattaatgtgtgggagtctaagtctctttgtaggtcactcaggacttgctttatgaatctgggtgctcctgtattgggtgcataaatatttaggatagttagctcctcttgttgaattgatccctttaccattatgtaatggccttctttgtctcttttgatctttgttggtttaaagtctgttttatcagagactaggattgcaacccctgcctttttttgttttccatttgcttggtagatcttcctccatccttttattttgagcctatgtgtgtctctgcacgtgagatgggtttcctgaatacagcacactgatgggtcttgactctttatccaacttgccagtctgtgtcttttaattgcagaatttagtccatttatatttaaagttaatattgttatgtgtgaatttgaccctgtcattatgatgttagctggtgattttgctcattagttgatgcagtttcttcctagtctcgatggtctttacattttggcatgattttgcagcggctggtaccggttgttcctttccatgtttagcgcttccttcaggagctcttttagggcaggcctggtggtgacaaaatctctcagcatttgcttgtctgtaaagtattttatttctccttcacttatgaagcttagtttggctggatatgaaattctgggttgaaaattcttttctttaagaatgttgaatattggcccccactctcttctggcttgtagggtttctgccgagagatccgctgttaagtctgatgggctttcctttgagggtaacctgacctttctctctggctgcccttaacattttttccttcatttcaactttggtgaatctgacaattatgtgtcttggagttgctcttctcgaggagtgtctttgtggcattctctgtatttcctgaatctgaacgttggcctgccttgctagattggggaagttctcctggataatatcctgcagaatgttttccaacttggttccattctccacatcactttcaggtacactaatcagacgtagatttggtcttttcacatagtcccatatttcttggaggctttgctcatttctttttattcttttttctctaaacttcccttctcgcctcatttcattcatttcatcttccattgctgataccctttcttccagttgatcgcatcagctcctgaggcttctgcattcttcacgtagttctcgagccttggttttcagctccatcagctcctttaagcacttctctgtattggttattctagttatacattcttctaaatttttttcaaagttttcaacttctttgcctttggtttgaatgtcctcccgtagctcagagtaatttgatcgtctgaagccttcttctctcagctcgtcaaaatcattctccatccagctttgttctgttgctggtgaggaactgcgttcctttggaggaggagaggcgctctgcgttttagagtttccagtttttctgttctgttttttccccatctttgtggttttatctacttttggtctttgatgatggtgatgtacagatgggttttcggtgtagatgtcctttctggttgttagttttccttctaacagacaggaccctcagctgcaggtctgttggaataccctgccgtgtgaggtgtcagtgtgcccctgctggggggtgcctcccagttaggctgctcgggggtcaggggtcagggacccacttgaggaggcagtctgcccgttctcagatctccagctgcgtgctgggagaaccgctgctctcttcaaagctgtcagacagggacacttaagtctgcagaggttactgctgtctttttgtttgtctgtgccctgcccccagaggtggagcctacagaggcaggcaggcctccttgagctgtggtgggctccacccagttcgagcttcctggctgctttgtttacctaagcaagcctgggcaatggcgggtgcccctcccccagcctcgctgccgccttgcagtttgatctcagactgctgtgctagcaatcagcgagattccgtgggcgtaggaccctctgagccaggtgtgggatatagtctcgtggtgcgccgtttcttaagctggtctgaaaagcgcaatattcgggtgggagtgacccgattttccaggtgcgtccgtcacccctttctttgactcggaaagggaactccctgaccccttgcgcttcccaggtgaggcaatgcctcgccctgcttcggctcgcgcacggtgcgcacacacactggcctgcgcccactgtctggcactccctagtgagatgaacccggtacctcagatggaaatgcagaaatcacccgtcttctgcgtcgcttacgctgggatctgtagaccggagctgttcctattcggccatcttggctccacattccctttttaaaatttttgtagagacgggggtctcactatgttgcccaagctagtcttgaactcctggcctcaagcaatcctccttggcctcccaaagtattaaaattacaggcatgaaccatcatacttggcctataatctgctttttgcagttaaagttatccccaaactactttttcataatgtcatcataattgttattttaatttgtggaaaagaaaaaaatattattttagtgactgcataatattccattcagtaatcccatcttattttgtttaagcttgttgttagccaagttattaaacaagatgctccttgaactttactgaaaataattgtaaatgcttagcgttttcacaatgaaatcacctatttaccctaagtgtaaagctctgttaaatggatcccttagtgagacaactcatgctgatgatgcacaggatcccaggcctttggccaccccaatgggaaaatgctttcctagtgtcttttagcttaaagcaattattcaaaattggtacacattgtgggctcagataacccagaaattaaagagaactctgttggcggtactggttcttcttgtaataggtcaggaatgtagacattatctttattggtacatgactactgaagttctactttttttaaaacaattatctggtctctaagaggactaaattgtatactgcccctccaaatctaaggagagggccatgaaattagccagtgttctcacctttctgatcagggcagggtgatgggtttgcaggagtatgtggctgccatccctccttcttaggaagaaaatggatcatgggtcagtttaatttcttaggtctttggaaaaaggttacgaataatgaagctgggatgtattgtcctagacaagggtaaactgcagtagttaaaagttttaagtaaggttagctcctttttggagctgaatctgcatgggactagaaatctatattgtgcctattatttttattcttattttccgacctgataaaatgagttatttattcatatgaccttgggcaatgacataaacttcttcgatttcagttttttccattttctaccagaaatgattacatctggcttacctgtctcatgagattgcagtgagaatcaaatgaaatgttgtaaattgtaaaagcctctgacaagttcaaggtagatgctattattaatcattggtaatgatgatgagtagaatattcccagatagcatcatcagacagtgctacactctgtaggtgtgttaggctaggacatgatgagtgatgccaattaatgccagtgatttgttctctcatgtaaagctagccaagttattttactgtctgcctttacttgtagaaagtgtgctctcacagatgttggtaagactaaggtgttctgatttcacaagatgcaggtaatccatagaatcagtcaggaagaatgtccctagtatttttatgtgctacagtgataaattataccaagacccgtttgtcaacagcatttccagaaataagagaaagtgtcatcaaaaatgaaggacaagtcgtgactaaagaagcatcttccctatttgtttgaacagtcaagcttgctttaaatcgtatccaagttgtgtagtaaacttgcctgcagagagtaagccacacagatgcccacaacgtcactgagaggcacgtgacccagtttctgtggtctgagctgaaagataacccgggtgtgtgatggccacacctgcctgtaaaacattatatggtgggcactttttcaaattcacatttttaaagagggaattagatggttttcatttgttttgcttaggttttgtggtgtaatttttttctccagaggtcatctcagcagcatctccataaataattatcaagggattgggagatagttttgcactcactgtcttagaatacaaatcttcccatacaaagccatatagatttgtccagggaagataggaaataattgattgtgtcattgttctcttggcctgactttgctccggtggctatggcacacggggtgatagattaactctttcaggtgtatggaaagcatgttcaatgaatcacaacttcagcacacagagtattttgatggtatttggaaagaagcaaatattctctctttttttttgcgggggggaaagtgtctgatgacaccatccatactttttagaaaagactggagtgtgggtcattttcatatctgtaaggctttgaaaaaaaacttatggtaaagaaacagatcattcatgctagggaaagaaagctatcacagacaagctataatccacatatccactgagtgccagaaaagagaaaatgagatcaatcagggttacatctggggatttacatccagacaatgatgactgcttccgaagggaggaggaaggggttccaccatgggtagagttctagttgtttggaatggcgtcctcatgaacccacctgaagtgttgattccttatccacatattttttgataaagcttcattgtggtactatttttaaccatcactttgactaaatgcgagggttcatttgtgttaagtgggtgagcagttgacagagtagaccttttgtaacctgctaaggagggaacaaggtcatcaagacgctaagcattcaagaaccatggtcttctactatcacctttgcttttgtgtcattttttttttctcaaacgtgatgtgtaaatcaactgcaacagaattacctgaagagcttgtttaaatacagattcctggatccaattccaggtctgttgaatcagaatatctatggcaaaaccaagaatggattttttttttttttttttgagacagagtttcacttttgtcgcccaggctgcaatggcacgatcgtgcaaaggcacaatctcggctcactgcaacctccgcctcccgggttcaagtgattctcctgcctcagcttctagagtagctaggattacaggcgcccgccaccacgcccggctaatttttcatttttagtagagacggggcttcaccatgttggccaggctggtctcaaactcctgaccccaggtaatccgcctgcctcggcctcccaaagtactgggattacaggcgtgagccaccatgcccggccttaccacaagtgattctgatttgagaaccactctcctaatgctgggtagaggagtggttctcaaagtgtgttcctggacctgtagcatcagcatcacctcgggagcttcttagaaatgcaaattcttgggccctgccccagacctattgaatcagaaactctgggagtgggggccagctatctgttttagcaagcctgctaggtgatgttgatgctcaccaaaatctgagaagcactggggtagagtacatcagttcccttcagtatctctttacaacagtagggaaggcaatcgttaagacaatgtgaatcatttgcaacctgggtttgtttgtaaccatgaaatttcaaatttagaagaactttataggagatttaaaccagcaccccttctagtgctggttttctttcttctcctcccacgttccctcctttctttccttctttgaacacttaataagtactatgtactagggagtagggatgcaggggtgaatatgaatggcagcaccctatccttttggagtttacagtcttggggaaagacatatctcacatgattacactaataactgtaacattataactgctgtaagtacagtggtgggaggcacatgatgccatgagactatataatagagatttgagcaaatctgtacacctgttacaaggtaactcagcccagatggagtacttcctttctaggggaaattttgacatcctgttggagcctatttgactttaagataagcccatatgttagaaatttgctccttatattgagtcaaaatctgccacactctaaatgacacaaccctggttctagtatctgaatctccatgaaacgaatccagccctctgttccattgaagatcttcgtatagataaagatctctttcttctaggtttttcctttccaaggctgtgagattcctcattcacttggtcttcttcagaagtactccacttttttctttattttaaaaaatgtttgtaaaatattctggtatccagcatgagctagagccatggaatgatgagctcagaggagcatacctcagaatacatctgtgaccattcttgttcctgttatatttcgcatttatgaggctcaaccttacatgctttgtggacaattgtatcacacccctgactgacttgcactgagcttgcaactaaatgaaaccccagggtttggggttttttttcttcaaacttcgtacctttattcattcaatttattcaccaattttttattcatgcctactatgtatcaggcacatattgtttacttatatggatgtgtttttggacttaagtgcaagattcatttatccgtattgtaccccattttggatcctggttctgtcatccactaaactgtgaggaacttgaagttaaaagccatatttttttcagctttgtatcctcagagcctaactcagtgtctcatatgtagttggtaaagaaaatttaataactataatacacatacacacacacacacacacacactcacactcttttctaagtaattgaacatgttttaaggcaatgccctggagatttccctccaggatgtcaataacctcagccctttacccagcacccatgatttgggtggttttaactatttgattgtgtctatttgcatcatcagccagtctaagtttctttactgtgccaatcaaaatcatgcaagatgttatagttgcctaggtacaggatgtctccgacagccttctaatctaccaatctagtatgtctatctgaaggaaatgaggttagtctgtcttcacttgttctagtagtcaccacttccttttcgctgttgacaaatagtcttttaatatttattgacaagtcaagaattcaagagatggactgcctttagctggacaaggtaggcagtatttttctctgcagccaaaaatttatctcagaacaatgtctttactagaaacaccattcttccatttgtttgagaagtgttttatattctcagggtgagttcttatatttttatactttcaactagaccaacaccactgtaactcatccttgggtccctggatctccatggggtatacatgtattcttgacatattcctcctctccttctgatagggctgtgtccactaatacagatatgatttggtcagtagattaatattttggtattatagtttataaaatataattgagggagctctgataatttactgatttcttctaagtaatggggctggttctcgtaagaattatcatttatgatatggtgataagcatttgcttaggttggtcatgtataaatgtgttttaaaataaaaattaaaacttttattaccatttcattagaatgagcaccattcattgttaattccagggaagttttgttttgctttatttttagtaatgccatatcacaccctatgtggccctcagtctgttcaattgtaaaatgaaagatttggactaagtgatctctaatctatgatcaaactctagaattatattattctaaactttgagaagaaaagtctcttttaaaataaccttaaaattaaatggaacaggccaggctcggtggctcacacctataatcccagcgctttaggaggccaaggcgggtggatcacatgaggtcaggagttcgagaccagcctggccaatatggcaaaaccccgtctatactaaaaaatacaaaaattagctgggcgtggtggtgggcacctgtaatcccagctactcaggagactgaggcaggataatcgcttgaacccgggaggtggaggttgcagtgaaccaagatcgtgccattgcactccagcctgggcaacaagagtgaaactacgtctcaaaaaaaaaaaattaaatggaacaacacacacacacacgcgcgcgtgcacacacacacacacacacaggaatgcatgtaaaactggtgaaatctgaataaaaatgttggactgcagcaatgtcaatttcatggttgtggtatatcgtactatagggttgcaagatgctcccttttgggaaacccgagtgaagggtgtatatagggtatctctatattatttcttataacagcatgtgagaaataagaactaataatttgagataatctcaaatttgagatcttatttgagataatctaaaattatctcaaaataaaaagtttttaaaaattacatgataaactgttataacaggactttagaggtaagtggccattgcttgaccacatgctagcttaaagaaactatttagccttcccaaaactccattttcttgtcttctgtaaagtggggatattaattcctgcctgatgggattgttggaaggattatagagactgtgtgtgtgtaagcatctctcatggtccatactccatggtagggactcagtaagtgttgattaccttcccctgttccccttctttgttctagaaagaaactggggcacacagcctcactgcatctcccataggaaagatgacatctgacctgaagcaaaagacagtttagaagtgtaactcagtgagatgagccccgtagcagcatagtgagtaatgctgttacataactttcacaaatcacccggcagatcagctaacagggcttggcacagtttactgatgaaataaaataacaaggcagcttccaaacccagcctgagtcagggagtcccaacaccacagccagaggcagaatctagaatgactccacaggccttggagctttggtgtttcagttgattcagatgtgttataaatctgtataagtggaaaaaaataaaagcagctcctctctggctggccccatgaataactgtccccaagaggcctagagaagttttcctttccttgcagaatccttaatcatgtctaccaaatatgagttttccatgcagctgcatgaatgaggaagtagagagagactaaagagaatagtgcattcctacacagttcttggtcgtgaggatgtgattgttgaatgaatggccaaaatgtgtctcccctctatctccccaaatgcttatcgtttctcagggctctttcctcactcctgatctggtgaatgtttttgtatcgttgagttggccagaaacatagaaggcaaacttaccaggttttcagatgatactgtggtataagagactcaggggacagaatcacagtttttaaatgatttcagcaggttcggggctctgggccgagcacagtaagttgtaatgtaatagagataatgttaaaaatctgtccttcgaagtcaaaagcagaaatacaggctaggagaggcttatattggcaagagttttatatgaaaaaggtataaggatttataactctagaaagacaggagtcaacagtgtgacgtggttgtattaaaaaagaggttagagatcagaaaaagaaagtatcctttgacttggtataatttgcaccagtcggacaatacctagtctattgtattcagttgtagaggtcaagtttaaggaagatatagataaatttgaatggatcactgagggaaagaaggaaaagggaaggtcaaattaaaaagattcaaaagatacgctgtttaaagaacagttgaagagaaataaggatattcagctgattactgtttttttctcgggttaccatatggaagaagagtaaacttgtctattttgttctgaaagggagaaatgagattaatgggagagagagtccatggaaacagactttggctcaatagaaggaaaatttggagcagttcagtgatggaaagaactattttcattaaattgtgagcttcctgtcactggaaataatcaagccggggccaaaccagtgtctgtctgggattctgaaggatcccaacattgaatgagagcttggggtaggtgacctttaagatcacttccaactctcatagtctattatttaagttagcatgaatgccagggccacttacaacatgccagagccactttttcaacttttggctctgctactgaccagctgtgtgaccttcagctaggaaattaaccatttcttgttccagtttcctcatccattaaatgagagagctgaatgtagtgatgtctaagttactccccagcactctgtctccctaggccttctcataattatagcacgctggaagagtagagtttgggctgatagctgccatttgtttctaagttggcttgccaggagactgcttaaaagccaaaaaccattttgattctgagggccacagaacgaaactctcaatttgcttattggcaggagagtaggtgattgtgaacctggaatttgttcccatgagatctgtggcaggaagttcataaaataactgctaatctggtttctcttgaacacctgtacattctgactgagctcagcaatgccttctcaaacaacttagaataaatgaagcttttatattaccattgcagcacagtgttatcttttacaaagcaaacctttgtcgtttatttgcttaatgatctgtcagttgctattgacctgtgcttataatcttaagaacaaatgtatataaagcaacttacaatgtagcagatttgttctaaaagttttacatatattaatttaacagtttattagctgaaaatacaatgatgaatcagtagattagatcttttttcctttatggaaaggaagtatttaaaatctagtttaagtctgcctgaatggtagagtccagaattcagatccaggccctcattctctgaggcttcgttgttggatgactataatttctcttgtggctcatttgattattaatacttttcttctcttctgtattaagatgcttcacttccaccactattacattggagctctccttctggttccttctttgacttctgtctgacatccacatctccaaatcccatttcttcagttactttttccaaagatctttgaaacacagccatcagtgggagtgtcattgtttgctttgatatagatacagaaggtaatggacaagatttcaagtgtctcctgcagttactgaggtcagtagaggaggaaatatgtaaatttatgcttcttataaggatgtgaagaatttaaaacttcattccctggcttgcagatctggccatactcactgcatccagacacagtaccatattttcttccatctctttgttttcttaggttgaaaatgaaaacagctgttaaaaataagagcacatgagtcaatcttgaatcccaatgtaataattacagtttccatctcagttggtaaagtccctcccagtgtactaagccccatatcacaatccccttgtggagagaacgctgccaatggtattgtcaattttatagcaagactttaatttttgtttttcaaacctctaagattaaacattaaatcacttgccaagccaagaaaaataatgaggaaaaaatacttcgatttaaaaacttgattcttcatatctcaaaataataagagctatttatgacaaacccacagccaatatcatactgaatgggcaaaaactggaagcattccctttgaaaacgggcacaagacagggatgccctctctcaccactcccattcaacatagtgttggaagttctgcccagggcagtcaggcaaaagaaagaaataaaaggtattcaattaggaaaagaggaagtcaaattgtccctgtttgcagatgacatgattgtatatttagaaaaccccattgtctcagccccaaatctccttaagctgataagcaacttcagcaaagtctcaggatacaaaatcaatgtgcaaaaatcacaagcattcctatacaccaataacagacaaacagagagccaaatcgtgagtgaactcccattcacaattgctacaaagagaataaaatgcctaggaatccaacttacaagggatgtgaaggacctctttaaggagaactacaaaccactgctcagtgaaataaaagaggacacaaacaaatggaagaacattccatgctcacagatagaaagaaagaatatcatgaaaatggcctactgcccaaggtaatttatagattcaatgccatctccatcaagctaccaataactttcttcacagaattggaaaaaaactactttaaagttcatatggaaccaaaaacgagcccacattgccaagacaatcctaagcaaaaagaacaaagctggaggcgtcacgctacctgacttcaaactatactacaagggtacagtaatcaaaacagcatggtactggtaccaaaacagagatacagctcaatggaacagaacagaggcctcagaactaacaccacacatctacaaccatctgatctttgacaaacctgacaaaaacaagaaatggggaaaagattccctatttaataaatggtgctgggaaaactggctagccatatgtagaaagctgaaactggatcccttccttacaccttatagaaaaattaattcaagatggattaaagacttaaatgtttgacctaaaaccataaaaaccctggaagaaaacctaggcaatactattcaggacaaagacttcatgactgaaacaccaaaagcaatggcaacaaaagccaaaatagacaaatgggacctaattaaactaaagagcttctgcacaggaaaagaaactaccatcagagtgaacaggcaacctacagaatgggagaaaatttttgcaatctacccatctggcaaagggctaatatccagaatctacaaagaacttaaataaatttacaagaaaaaaaacaaccccatcaaaaagtgggcaaaggacatgaacagacacttctcaagagaagacatttatgcagccaacagacacatgaaaaaatgctcatcatcactggtcatcagagaaacacaaatcacaaccacagtgagataccacctcataccagttagaatggcgatcactaaaaagtcaggaaataacagatgctggagaggatgtggagaaatagggatgcttttacactgttggtgggagtgtaaactagttcaaccattatggaagactgtggtgattcctcaaggatctagaactaggaataccatttgacccagccatcccattactgggtatatacccaaaggattataaatcatgttactgtaaagacacatgcacacatatgtttattgtggcactattcacaatagcaaagacttggaacccacccaaatgtccaccaatgatagactggattaagaaaatgtggcacatatacaccatggaatactatgcagccataaaaaaggatgagttcatgtcctttgcagggacatggatgaagctggaaactgtcattctgagcaaactatcacaaggacagaaaaccaaacactgcatgttctcactcataggtgggaattgaacaatgagaacacttgcacacagggtggggaacatcacacactggggcctgttgtggggtggggggcagggggagggataacattaggagaaatacctaatgtaaataatgagttaatgggtgcagcaaacctgcatggcacatgtatacctatgtaacaaacctgcacattgtgcacatgtaccctagaacttaaagtataatcgaaaaaaaaaaaaagaaaaaattttcaaaaaaccttgattcttgaaacatgctcttttttcaaaatttaatttagattttgaccaaatctctatgttactattggaaatgtcagttactgttccatattcgtttcttttctttttatttatttatctatttatttttttgagacagggtctcactctattgccctggatagggtgcaattgtgcagttatagctcactgcagcctcaaactcctgggttcaagtgatcctcctgcctcagcctcctgaggggctgggactatgggcatgtgccaccgtgctcagctaattttttttgtagacatgtggtctcactatgttgcccaggctcgtcttgaactcctatcatcaagtgatcctccatccttggcctcccaaagtgttggaattacaggtgcgagccaccaccatgcctggccactgttccacattttttaaaatgcagcttcgaatggacttcgtggtatcctcactgtgaatagttttgcttgaactcttgtagaggctaagccttgaattcttttctcttttctcagttcctgaggtttatgatctagtaagccaatctcaaaagagtcatctaccacctattaattgattgttacctttgagagcagattgatccttttttagttctgcttagttccccatatcaactatttagtctcttactgaataatcccactgtctaaagctgtgatggttcctcctcaccccccaaatcagctgcctccaaatcaccaatgtaatgttgccctataaatgtgctattggcaggagagctttgtgccttataggaggagagtcagggaacttggccttttcactcacttcactttgcccttttatttcccctttctaaggcttgattatttattatttgattagattatttctgaagttcatttcctcatgaagatttctataattttgtaatcattgtgtcccccaagagccaattttatgtgctggaaatgaagacactgcatgcctagcatgacttatggaactctgagaaggccgttcagcccagctccctctatacaccttaagttccaccattagatattcattccttgtggtaggatagtacctctcagatatgacaccatttaaaatccagtatgtttagaagggcaaacccgtaaaactagtatgtaagacaatatagcatcatggttagaggcaagctctgaggtcagactacatttcacacctgggctgtgccactcactagctatatgatctaggcaattaattcatctttctgtgcctcagtctcctcatctgtaaaatgaggataattatactctcctcgagggtttttgtgaggtctcaatgaaatctgtaaagtgcttagatgaacattatcctgctttgtaagtgttagcaattattatcttcatttgcataaattggcatgttgtgttgatgcatattgtattgaaagctgataccgagtcacagagaaattgttttgttgggaaactggaaggagatactttgaacacaagaggcactgttaagggacggcctttctgagtaaggtgtcacagctggtagcgtaaaggcgctgggtgcctgtgggtggataggggagcatgtataagagagggtaaaggagacgggcctccttctagtcctaaccactatgctcagtaactgatagaattcatcagctaggacgatgaacaagtagtgtgatgtacacctgcaaattaactttgaattcagtacttgcttaactttctctgtgtcttataatcccatgccttgtcattttcagataatgctaggtctctgagccattacacttgaagagctatggggaaatctagagtgttttatcttgctgaatgccctttcttcttttctttagattacatgaagcagatgacatttgaagcccaagcctttttagaagctgtgcaattcttccgacaggagaagggtcactatggttcctgggaaatgatcactggggatgaaatccaggtaatatggggttcaaaattttggattctctctgtgtttgggtatttgggtgatacgaagtcagggtcattttattaaacaatcaaacagaaaagttgcaagtatggaagatgtggttccaaagaccatctctctcatgtctgcaagcattggtcaggaaactactgggcacctactacaaagaccaccagactgggcatgaaatagggcagccaaaaacatggcaactacagtggaaagagctgcctccactgttttctatgaaaagaattactctttcaaatgacctcgtgcttccagactagaatcaagtgtgagtaccgaggaatagtgcgaagtgcatgacagggttttagctagggtccgcaaacttggacttcagtcatgccaacttatttaacctcttttagtcttagattactcctctggaaaaaataagaataataatgtttaccttgcatcatcgtgacaagtgaagtgcagttggggaagtatttggtacgcagctgtctttattgaattatatgtaaatgaagtaatgaaaaaaacaaattcaaaaagcattagacagttttctatatatttcatttatcttttctagttttctgtgccctgtggtacattataattcctcatgatcctgactagatgccaatcatggcctaagcacttcagtgggcttggtcccagggacagtattataaatctaaggaaactgctttgtgatgtgaccccagcctccatgatgacaccagtcacatggctgcttcacccaagaagaggaggctgggtacgggcatatttacataaagtaacacggtatttaagaatgctattttttttttttttttgagaggagtctcgctctgtggcccaggctggagtacagtggcgcaatctcagctcactgcaacctccgcctccttagttcaagcgattcttctgcctcagcctcccgagtagctgggactacagatgcatgccaccactcctgctaacttttgtatttttagtagagatggggtttcaccatgttggccaggctagtctcaaactcctgacctcgtgattccccctgcctcgggctcccaaagtgctgggattataggcatgagccaccacgcctggccccactattttttttttccacatctcctagggtacctcttttgggagctagtgaaattcattattagagaacaatatttggaggatgctgaatggtgccttgcctctgtgtggtcattaaacagctaatgctgaaaactcatgagggagctcttctttattgtttcaccatatgaaaacatgtgtttaccatcagaatcttctctttctctctctctctttttttttctgtctggtagattctaaactcatctatttcccaacctgagacttgcttctttcagaattttaaacaagtcttggtttctgatattttggggaagcacagccattcataagtgtgagagaactaaatagttatgtacttatgccattaagaaaaacaaaagtgtcagaaggggaggctgaagcacttgacactggctggcctgccatgtaagccaacatagttaatagatagatgagtagtcaaatgcttttgtgtgatacttgacaatgttcgaaacctaatggtgtttgtcttgccaatcttatgagatgggtaaggcagttattgttatttcaattttgtaaatgagaaaactgagggaagcatataacagctaagtgacttgcctagtctcattcattcaactactatttactgagcactgactctatgccgggcaatgtgctgggggctagtgacccagagatggacaagacagaatggtcctggccctgtggagctgatagtttcagagttacatgctaagtggacaaatgcaaaggcaatgatggcttctgatcctggccgagtgaaagaccaacaccaaccatgggaatatactaagttacacatttattttttaatagctccttgagttcagctatgccacttgcttcacttttttctttcacttggaaactaatgtgaacttacattcctccatgatgccattgaaaatagatatttaggccaggcgcagtggctcacgcttgtaatcttagcactttgggaggccaaggcgggcagatcacaagaccaggagttcgagaccagcctggccaacacagtgaaaccctgtctctactaaaaatagaaaaaaattagctgggcatggtggcggtcctgtaatcccagctgcttgggaggctgaggcaaggagaattgcttaaacctgggaggcggaggttgcagtgagccaagatcatgccaccctactccagcccaggtgacagtatgagactccatctcaaaaaaaaaaaaaaaaaaaagagtatatgtatttaataaatcctttctgggagttgagtttgagtttgttttggcttcaggctgattatgtgctaagtggtgtaagttggaagagagagaaatgactcgtcccttgccatcatggtgaggcgagacacacatagaaaacatgcagaagacaaggcacatatgtgtgtggggtatatgtatatgggtctctatatagatggagattgtaaagcatttgtgcaagtggtcatagtaagctcctagttttgcaggataaaaaacattttaagtgggaaagcaaaacaaaacaaaaaaagcagaaaagagatcagaaatcactggaggtatcaagtgtcccactaagaagtttcacaggggctgggtgtggtggctcatacctgtaatcttagcactttggaaggccaagttgggaggactgcttgaatccgggagttcgagattagcctgggcaacatagcaagaccctatctcttcaaaaagttttgtacaaattagctgggaacagtggtatgtgcaggtagtcccagctatttgggaaaccaagacagtaggatcatttgagcccatgaggtcaaggatgcagtgagctgtgattgtgccactacactgggcaacagagagaccctgtctcaaaaaaaaaaaaatggttttgcttctctcagaatttaagtgttttggtaaaataacagactaataaaatgtgaatgctggaggggcatttcaggattatttgtccagcaccctacaggtaagagaaagaacattcagagcagttggctgaagtcagaaaactagtctgttacagaaatgcattttaaaccggcttggagaagctggtaaaaggaaatggcctctaaagcttactgtgtgaggccaggtaaggattatagttcccctcagactctaagacatggtgcataacagtaaagcagtgtctaccctaagactcatagaaaaaagaggccaggggcccggagaagctaccaagtggttaaagaaaatggcatagcataactgagtttgagaaaatgacatcttttgtttaaagtgctgggtttatttgcattttttcttcctgtctgctaagaccttaatcttaaccctgtcctgaacccctctaccctaggggcctgcattcagacttccagccttgctccattaccttcatagtaatgactcacacagcaagaatggaaggccctcatagcgatggttattttaggcaagtgctcaggcaaagcaactatctcagaataacttgcctggcagactgttaaggtgaaaatatttgtatgccagtaaaaacatcaacatattttctacttgtcaatataaatatatcaaatgagatcatgagggaaagggctttgcaactgtaaagtatctctagctatgtgatatatttattatttgcttttaaaataccaagatgggctagagaacagctcataattcccacagaacagtttcaagacggaaaaaaaaaaaaaaaacaaaaaacaaaactacccgcatttttaggccttgtccacgtgctccagagttgtcttttgctgaaagatcttaagtgtgactccttttgactggattttttcacccacggccactcagtaatgcaaggggcctggaccagcagcctggtgagactgcggggcctgcttcaggaaggagggtggtctctctggaccccacaccttcctgacagctcagcatctgaaaggaagcactgtggtgtggccttcaaggggcgatcccgggtttgttggttttgatcaacctagtgacatgcttagtttcttgtaggagtgatagaatttttaaatctccaagtcctagcagttaagtatacaaaacactgcccttgccaacaccccccattaaaaaaaaaaaaaactgaagtatttttaggtcacttatgttaaaattcagtggatactgttctgaggggaagaggctagggaattccttcattattacaatttatttattagattagctactttctctagaaaagcccaagaccttaagactctgcttgtggaaggcagaccatggtagggaatgccagagtgggctctggggaggtgacaggcagcactcgatcagggcagggtggggctgaaagtcggaggatgaggatggtggttgggatgcgatgcacttgagcttcagcacccacaggctctgctgccctgtggctattccctgagccccactcccccactgtattagtccgttttcatgctgctgataaagacataaccgagactgggtaatttataaagaaaaagggttttaatggactctcagttccatgttactggtgaggcctcacaatcatggaggaaggtgaaaggcgcatcttacatggcagcagacaagagagaatgagagccaaatgaaaggggaaaccccttataaaatcatcagatctggtgagacttattcactaccactagaacagtatgggggaaacagcccctaggattcaattatctcccaccaggtcccccacacaacacatgggaattataggagctacaattcaagatgagatttaggtggggacacagccaaaccatatcacccccccgccactcgtaacccactcccaccctctctttttcctcgcagacatatttcctttaattccctaagttgtaacatagagccaaatttcttggaacattgtgtgggaaagactaaacaaaactataagcccacccaaatggaacattatttttctttggcctttatatataacattttcatattttcaaacccatttcacacttatgctaaaattctaaccagtctctgcaaaaggatgaattgggacaattcttatgacccttgagtttcataatgtcaacccactgattttaaattctggcattggtctctcttcctcttggctcactcttcccataccacactttcggcagatgtgttccaaacaagaacttatcccattgagcagggtgggctggtggattattaattacccactgaatctattaggttggtgcaaaagtaattgcggttcttgccattactttcaataattgttggacctgctaatttccatggagttttgtgcatgttaggttactcttaaacaccacagaaaatggtgattcatctcttgactgcccccagagaaggctgaagaaaggtcaaaaacatccccaccagtgaattaccagggctagtggaaactctgtccccatcataacttttgtcacgccaggcagatccacttggcagatgacaggagccccacttgctgcccagagctaagcaccttctctgccagcaacccacaggcacagtgggactggatagctcgtccacctccaccctgagagtgtttctatttgcttcagtgaaagcgttacaccttgctgcgacagagccctgattaaaggcaagatcaaatgagctcacgggcatttccactagtgaccagtgacctcagagcaaatcttccttaattcccaaagcataatttgaatttttatgagaagtgaaaggaggaggtcagttattttggacaaatattatttcaaactcatagaacagatgtttcaagtgattccctacttttctgcctgcttcccttcctaaaactgtgcttccccttttgtaaatcttagtgtgcagcctatgattgcaagctgagctgtgggccttgaaagactcgtggtgaaagtgaatctgaacagcaaagctgctgcaattcaggagcaggggtaaagaaggaagggccagtagcatgagtggatgtgtagaatactgctcagattcacaagaaatagtttaattgagccaagcaaaattttaggagtgatgtgggaacacattttttaaaaacacttgaaaaatttagacactccctcccatattctttttttattttttcctttttctttgtttcagtcccattaattatctcataccctcccataaatgttccaaatatttgtttgttccaaaatattggttattgccttctttttcctttttcaaactgtatccagtcttattaaagatgctttttgtaagcaatcatcgtatattagacaggccatgagcagacaattgctaacagtatacaacaacttccaaactctcttcttcaatgaaccaaaatcagacagctgtataaaacccagtgaaatcttcatttgcttagactctcgattgcagtgagggttgacatttcacatgtagcatgttgtttaacaacttttcatgagccaatcttgactttcaggaaatgaaatgaaaatggcagaatcatcagtctggagatccacaatctaaaaaaggaactgctgttgttttgagagctgccctctcaataggggtcactggaaggtccagatggccacctgactgctaattaattttaggtgtcaggtcccaacaggtctctgggtttaaggaagttgagaccatactaaaggcagagagggagaagaagaaataatgaattttagttttcccacaccataaggtgtttgtgccaaggtagctatgtgtgtcaatgccaggaatccccctcctgggagccaagaggaagtttctcaaaactggaagaaaaggtgtttccccacattaatccagcttcggagacattctattagtgacatatgccccttccccccgaaaaaatgaaatgttctgtgtaataataacatagctttaagaaaagtaagacaacattctacatttttataaaactccatttaaaaaaaaatagtatttccaattgtatggttaccagaagtacacagttatcaaaaacgcacacacttcccctggcatctccagcatcgtcagctttctgtgcctggtctgttctggcatctccattttctgcaggattatttccctctttgccagtgccagcctttcccttttttccttctgcgtaccttctcttccttcttagcaggggccttttggggcttgggttctggctgtggagaagcaggtcaagcagacaaccttgctgatcttctctgtggtttatccttcaatgtggctgtatctcttggagcatcccctcagactttctccagtgctggatgaaggcactgcatggtgggatgcagtggtacctgggctctggtcggtctagacgtcattctcacttcttcacactgctcctcccttcgtttactaaacattaaagaggatgacaatggggcttgggggacagtggggacgaagagcatggagatactttgataccttgatcatgaagggcttaggaggaatgatagtcccaggggacacagactaagatgcaagccaccaaaaccaagccttgcaattccttcacaattttgctgaagatgtccttatccattattgaactctttcattttactgtatgccctaagttcttctagtttgaatatgtgaagttcgaatttggggaatttgttatttacattgggaaaacaacaaggtgagaatatcagcagatgttactgttccttgcggatgtttaagaatgttcagcctctaagattgtcttagttgagatttctgtggcctctgtagtaggttaaactattaacctactacagagttcatctggtccgggacagggacagccaatcaggacatttttagttggcctgatgctcagatgtagccatcaccgactgaccgactctgggctgtcttctgctgcgcagatcctgagtaacctggtgatggaggagctcctgcccactcttcagacagacctgctgcctaagatgaaggggaagaagaatgacagaaagaggacgtggcttggtgtaagcaatggttttgctctacaactgagctactcaaaatgggaacattctcttcccttttcttttagggcatttgttgttgttgttgatattcccttccctgggtgtagaaatgcctacttcgaacctgctgagtctcacttacaagaagactgttccaaacagactccaactttgaaagaaaaattacaatgtgtgtgcagttctgtttgttatgatggcctgtgatgaaggctcctccctccacttgactccatcagtgcttacacgtgacagagccctgatttatgtgttattccttgttgcagctcctcgaggaggcctacaccctggttcagcatcaagtttcagaaggattaagtgccttgaaggaggaatgcagagctctgacaaagggcctggaaggaacgatccgttctgacatggatcagattgtgaactcaaagaactatttaattggaaagatcaaaggtcagtagagataatccatgctcttactaattaaataagctgtacatgcagggatccaccacatagcaggaatgcatggtttcagaggataattacacttaagaaattgggaggaggtgatcacagctgcaacaggaacatgctggaggtaccattaggggcctgggccttcccgtggaagcttcatggacacaaggcagaggaaagtttgtttcttgcctttggcagtgcctgtgtatttgatactgcctgcacccccaacccccattgtagcacccttgacactgaattagactggcttctgctccacctcctctctgccgtaagctctcaaagagcagagccatgtcaccctggtttactcaagtacacccagggcctggtgtcacgcctggcatatacagactcagcaaatattcaaatcaattaatatatggattttcctctaacatgaaagcccaaaattttggcttggagtcatacccagtcaccctacaaacccaataaatgtaggtttgtagccccaactccaatattaggcagtccatgcataattggggaggtcactcaccttctgtttagctcagtgtcctcctctgaaattaggaggacccacaggagtgggattggcaaactgaagcccttgagccatattgggccaccacctgtttttgtaaataatgttttcttggcacacagccaggcacattcatttatgtattgtctgtggctgcttttgtgctacaacagaagtgaatagttggaactgagaccttacggaccacaaaggcacaaatatttactatttggtcctttacagaaaacagtttgcctattcccatacaagagaccttagatggcctctaaggaatcctacagaatgaaattctatggttctccattctatctggggcctctacaacccaacaaacacacccgtacctagtgacctagtgtcacttcagaggagaagcttgcaggctcatctgtgattgtttattgacagtcttcctagaaagttctcagattattccctcactcactcattcattcattagaaactgtggactaagtgctttccaagcgagacaatggagctttagcagtgaccgaggaacaccctattcctgtgctcaggaggcttagagtctcggggctgtcggctttgtggattagcctctgcagttcaggccccctttccactgcagcccagcttgcttcagggttcttagcacaggtcctgctgagaggaggtttgaggaggcacagctccagcactggtgtgtgtgtctgtgtatctctgggtgtctatttacgccatcctttccaaagccagctctacattaacctcagagtatttgatgttttctactatctgtgtctcttattcctccattagtacaactaatctagagttgactatatattgaaatactttgtactacttaaaactaccagtgctcaacttctgtgccaaaatttctgctatctggagctaagttgggcctaactgtagccgttctcatggctgaaactaaattgtcatcctttgcttaaatctctgtggctccggtgtatccacatatgatggaaaaagattttgccctgaattagtatttatttcctaaaagaagccgtaaaaggaagtaatgatcaagtctttttaaaatggaatatcagtgttacagctcttttagaatttgtctagcaggctttccagtttttgctggaaagcccaaaaaatgaaaaataaataaaatgaaatatcagaaacacattttaactaggcatccagtgctccacctttaaaacaaggaagtgcgctttcggctgcattaataaagggctttgtatttctaaaaaaaaacctggggagtattaaatggtgatctgtctatttcctcccatatgactcttgggagtaaagcccctgagctttagttctgctgcacaattatttattcattcaataagtatttattctacttctgctgagtacaatggctggaatgactcaaagaagacaacgtgattttacaaggagaggaggatacaaagcatgtcacagatgctgagacagaaggaaaaacatcttcctaccagcggtagaacaaagagcacagtggttcccaatgtgagcatagatcccatttcaacctcaagaagctatgtgggcccctcataatgagagcacaggtctagtgtcgggggactggaaaaaacgataatgccaacaggtacaataagagctaacagttactgagttcttccaaggggccacttccagagttgtaagcacttgtaatatagtaaactcatttaatcctcaccataattgcttttatgatctccattttacagatgataatactgaggcagaaattcggtaacttgctgagattccagagctagttgtggtagagtcgggctccaaacccaggccctctggccctcgcctttcaggcatcatcgctctgttcagctccttccttcacttcagtaaggcttatgaattaatgtatcaaacacatatgcatcacagcggcatctctgcatgcttgaaaaatagcagtgcatacacgaatgggacatggaacttatccagcccataaggaaacacctgcagaccccagctcaggaagctgtgtgggagttccaggacattagggtgaaatttgaactgggccttgaagagaggagtaggatgtttatgagcagaggtagaggaaggaaggcaaggtaaaggaacattgaataaaggtgcagagagggggcggaagcacattgtggtaagtaggcacagagggagagtgggcagagaggaatataccctcccacggccctcctgtgcctatcttggccccacccagatctgccatctgctgctagatctttattgcatattacccatgttcagcattgttctgaaatttccattagatgcttttcaaatacttcctctctttaaagttaattaactaataattaatttatctcctgacaaacagttttacactttagtgtcaagcaagtcatttttagaagactcttagattgtgtcatatttggatcatacaattgaaagggttttttcttaataattctatgacttgtgtaatattttacatcccaaatatttctgagtgatttgtaatattaataatattagtcattttggattatcagaataagaggccatgatctggtcctgcacaactctgtgaaatatttccgccagttgaaataagaacgaggccattcatctcactgtaagcaaattcccaagaagaacttaagaaagacacttgaatgttagccctgctcctgaaaattagggtctgatgtttgtccagtcatcaaacatctccaggcctcatttttttcatctgtaaagtggagagattggataccagctccacttgtgcttctgttctcagttctgtgattctatgacaaggctctgtgacctgcctcaatccacaaggctagccttctagtccacggagcaagctcaggcttcttctagctccggcctccttcactccattgcgtcttcctagctgatcatgagagttacctctgctctgaaaacaatgcaggtttccatgtcctacccagactgcaccaggagcttcactgtgctctccctcttctaaatcaaagaggagtactttcctctggggagtggaattatagtggcattttttcattcttcttcgtgatcaaaatgtattctacatttttgtcactaagcatgtcatcttggtcagaaaaacctattgtgattttgttttgtcttgttttaatcagggatggggacaggaggtagggtggcaaactgaatggaatttggttccattggcccaagaaaagaatgtactggagttcttaaaaagtattttggtggggagaggaggatggaattatactgagtgattaactcctagagaaatgaattaaaacaataaattgtgtttttagaagacaaactgtgcatatttaatgatagtgattgacagtagataggtggatcaccagccttttcttcttcatatgaagagttgcatgttcagagggaccaagcagaaaaatgcattttatcccagggcagaggaaagcttggggagtggataggtttggtccagttctgaaagggtccagtggttttcctttcttgtgaccatgggcaccaggctcattgtgctagtctgtcatggcctcttgagcttgccttggctgttaaatggctccgtggggcaccattcagctctggtctggctccagtgcccacaaacccagttttgccatatgtcacggttttttggctatttcctacctcagcgatggtggcccagccggcggagaaaagctgcttggagagtgtgcagccattcctggcatccatcctggaggagctcatgggaccagtgagctcgggattcagtgaagtacgtgtactctttgagaaagaggtgaatgaagtcagccagaacttccagaccaccaaagacagtgtccagctaaaggaggtaggatacaaagctgaggagctgggtgtgaatggtctgcctggctgtgttttccatggggctttatctgccatttctccctcccttcctcccttctttccttccttccattcttctgcccttccctccattcatccagcctttcttccgttcattcagacccaccattcatctgtctattcatccatccacccatctgatagttttactgatggttttcaagttagaaaaataataacctgtgtgtacaagtgaagcaacatactcaaatatattaaaggcaaacttagtcaccatcactgatacccactaatcctagtccaccccagactcctaggctacccccattccaaactccttgaattaactaatagaaatagcttggtatatatttttcctatagtttttatttattcatacaagtatatatcctcatttgtagaacattgttggtttgttttcaaaaatatagacttatgatatgaaatttgattaaaaaaaaaacttcagccaaattaaatctaaaggagtttaattgagcaacaaaccatttgtgaatcgggcagcccctagaatcacaacagattcacagacactccaggggtgcctcacggtcagaacaaatttatagacaaaaaaggtcaagtgacatacaggaattggaagtgaggtacagaaacagtgaaattggttacagctcggcatttgccttatttgaacgcagtttgaacattcagcagtctatgagtggttgaagtatggccgctgggattggccaaaactcaactattgttataggtgcatactactaagttaggttttcaattttgtctgactattaagctaggttacagttcatccacaaggacttatatatataagaaaggagtccttcttaggccatagttagtttgcattaacaattcccccctttttgcaaaggatatgaacagccacttctcaaaagaagacatttatgtagccaacagacacatgaaataatgctcatcaacactggtcatcagataaatgcaaatcaaaaccacagtgagatatcacctcatgccagttagaatggcaatcattaaaaagtcaagaaacaacagatgctggagaggatgtgaagaaataggaatgcttttacactgtcggcgggagtgtaaacttgttcaaccattgtggaagacagtgtggcgattcctcagggatctagaactagaaataccatttgacccagccatcccattactgggtatatacccaaaggattataaatcatgctactataaagacacatgcacacatatgttaattgcagcactattcacaatagcaaagacttggaaccaacccaaatgtccatcaatgatagactggattaagaaaatgtggcatgtacaccatggaatactatgcagccataaaaaaggatgagttcatgtcctttgcagggacatggatgaagctggaaaccatcattttcagccaactatcacaaggacagaaaaccaaacactgcatgttctcactcataggtgggaattgaacaatgagaacacgtggacatggcagggaacatcacacatggggtcctgttgcagggtgaggggcaggtggagggatagcattaggagaaatacctaatgtaaatgacaacttgatggatgcagcagaccaacatggcacatgtatacctatgtaacaaacctgcacgttgtgcacatttaccctagaacttaaagtataataaaaataaaataataataataataataattccccccttttggtcattttctcaattttgagaaaatgaccaaaaccttagtcattgatgttactagcactatcgtaaatgtacttatatggttttgaaacccactgggaaacagtagaacagtgggttttgcaaggagggaataaggactgagtagagagtaccttcttatgctggaacatcctatttacaggagaaaaacaaaacctggtatgttctaggatctatgtgttttcttaaagccctagcttgattatgtcacatttagcataagtggctctattttagcttggtttggtttgttggggcctagtgcatgagcttagtcccaaataatggcctcccatttaaaattttgtttaaaaataattccccctcttgggccaggttttcacttaggtgagagtgtgaccaaaacttagggccttagtgccactttcagttaccatcattttgggtttctggtctcagcatgtcattcatataggttatggagtcctcatggtcacatgtttctttcagcttttgtcatttcagttgaagggggaccatttgacatcctagagatggctacatgcaaacatttaaaacctttgagagaatacagcacaccaggaagactattattatgactattgggaggataatatcaagagtttggagtatgctccttacccagggtccccataaaccaaatcacctaaaattaaatagattaaagaatgagctagatgaagagtctactcgcttgactaagtggtcttttcattaatcccctacagctggatttttataatctacatatgatgtatttctccataggccacaagtgtcagcagctgcataggtacttttctgtttagccaattttattatttagcataactttcacaagagaatttaaagtatgttgtgtaacgacagcctttaaagtagaatttactgtagggcctattatgagggagacatttctaattattgccttttagtctaaaccatggaaaaaggacctaacaaatgatgtccttctagaagagtgaaggcctcctggcagtgttctctttaatccatgatgcggattaagaagagttttgactgattatgaggcaacgtgtgtaccactaaagtttctcacctacactgggccttcattttttatctattaaagtataaggctattcatgtataaggctggctgcaaaatccttcacaaataaaattataccctataagtgcacataatagacctccttttcatttatactgctcatagaggcatacacaaggaaaaaatattcaaagatcagagtcttgtgatagcagaagtcttgatccatgatcttgggaaaaactgttcacatcaaggatgtcatcttcttctggggagaaactgtcctggttagattagcttaaggggtccaatgggtgtacagttccaggagtgtgaaggaacccttctcagttgtgagattatggacccaaagttcaagtctccaaagttttgctgtagtgtggagggcaatgacagtctttctctgatgttttcagaagatctaatcttcaggttctagattatgaagggattgtcctcagtgaaccataaaaagctttctttacctggggaaaatacattgtagcataataatctactgttataacatcagccctcttgcatgggaaagcttttatacaactagaaaacatgcattgaaaatgacaattgaatgaaatccctttataaatgtttaaatggcccatcagatagccaaatgtacctgacgctttaattttttccccaggaatatggaagtgaatattggttctaaactgtttccacaatttataagtcaccatatcaatatattcaatttggattattttatcttttccatgatgagtcatggaatgcagaacctttaataacaaaagcttaaggattcaggaaggacaaggtggctgtcctagttcttcatgagtccatgcttaacactggacttacgtcctcttgaataccagttgtttctccaatttaggtgcacagcactgataactaatggtttatcataggtaatttgacttagaccatggagttcattcaaattgtatatttaaacaatttcagtattggctgatttagcatgataatctagagcttggttttgaaaggtttgtcaaataccacaggtttaaaacattggatattacaaaatagaatcttaggttaccataagtcattcatttagccaaaatgatgatacaaaaatttttaaaaggatgaaacatgactctgatggaaaggggaacagctttccaaataagacccaatgaatgtagcatgaggccaactgactgtctccttgccttcccttttgtagtttacttaaaaggtaaacaaaaacctttcattatcttttaatattatataaaaatcatttttaaaagagaaaaccaaattttatgtttccgttagtgtatttttaatgttaaagctagtttttaatatttcataaatatattcagttttaattactttgaccataaggtaagatttttataaaccttttataactcattagaattttttttctcagaacagaacaatgttccaagaaaactttgttatgcttttattcccatgtccaatttagggaaaaagcaataatgccattttatttagccaatatattcacacatagaatctcttacagttaattttttataaaccttccacaacctgttcaaacctttagctttgtataatttaaaacaatcctttaaccctctaacctaggcaaaaatttacatttccatatgttcttataatctcttacaaaaaatacatttaattctccttacataccttgcatgtaaacctatttttttcagtaggctcaattacatattacagtgttaactcatagcaacttttacttttggtaaaaaccttggtgagtaagggattttaattatgtactaggtgtggagcctaggacccagatagaaatgcagataaggtatgacttattccagcatcgaactccatgtgtcccaggccttagctagctgtaaagccagcaagctgtacagtgaaaagtcatagtgtcagcttatgaagcaccttcaaattatacaacatttctggcataaattccttttaataaattatttcacaacttacacagaccatgtacgacatgtttagactttctgacttgcttaaacatccctctttttaaacaaccagtcattttactttaggacaataatttaccatacaacatcctctcttatataaaatctcttttctttataaccttctttacatagctagggggcatggttaattccatatatccccaggccttatttagaatttaatgtctccaaaataaattgaacaattttcaaaagtcaaagcagttagcaaacctattatctgacctgcataatttagacaaaatgtctttattttaacaataatttttaaagctgttttcatttcccaaaaattactgaagttaatgaactaaaaggtattatagtttttattttgctttcaaaatatttgatgtaagtgcttatttttgtttaagccaattagagttcttttatataaacattacacacaacacatatataattacatagacagacagacagaagaacattacacagtagttgtaagatttttcatttgctagatttttaatttcttaattggttattggctttatggtggagtccttggaagaacagggccaggaaaggggtctctggtgcctccagactgttagagcttgatattcacttttaattaagtggacttttaatcatagcactctttaataaagtatttttaaaatttcttattaaccaattttagccaggccaaatgactgatgtttctggcttttgaactttaccaaagtaggtaatctcccagatgctcagagaaaggaaaatttaagatagtccatggaggagaagagactagacagggtcatgcagatattcaaccagaaagaacttgcttcctaagcagggaattgcacctggaccaccagtgtgaaagggcaaaaccttagctactgagctacagcatggagcaatctctactgcccttcccagaaggcatctagagtagttaactttgagtttgcaaaggctttaactactcaagataatttttagagctaactatgacataaactctaaaattccattccctggaaggcagagaccaagagaaagtactgctatgtggttacaaagtcaagctcccaaggacataaaacaagatggagataagcagtgatttttaccattcattcgactgtttttatatatagagagaagccagaaatctgactggtaagaaattcttaccttttggccggcatgccaggctctgggctccctttccctgagtggctctagtgacccagcttgctgcaccatcctgctgggggccaagccacgtcataaaggaaaattattatttttttcattctggctagagcaaaatatgtatgataaaacatatacattagccactctgcttagcacccaatatcaaactggcaaagcttaaatttgccctcagatggccctcctcatctttaatcaaacctccgactaggagtttcaacttgtggtctctgggcaagatggttgccctgagtaacagaaaagataggaaaggaaaataagatgaaggaaagtattgcctgtgggagggtgcataaggtgaagagctcagggaggccagagcaagacccattcatttcagcgacactgaaaagttctgatggccactagttagtagcgaaaggatcttttccagcagtctcatcagctctcaggtttctcccttttccgggagggaggaaaaagctccccatgtcccacaatcctgtacatgcctaatcctgtcacccacagccatcagcaaagagtgcaagtcagattattccaaagggaatagcagttgacatcctgtagtgccaaaaccgttcctagccaaaagggactttactgagagccctcattttaaaaatgtacttcaatgcagccgggcgcagtggctcaggcctgtaatcctggcactttgggaggccgaggcgggcggatcgtgaggtcgggaaatcgagaccatcctggctaacatggtgaaaccctgtctctactaaaaataccaaaaattagccgggcgtggtggcggggtgcctgtagtcccagctgaggcaagagaatggcatgaacccaggaggtggaactttcagtgagccaagatcgcgcctgcactctagttgggagacagagtgagactccgtctcaaaaaaaaaaacaaaaaaaaaacaaaaaaaaaaaggaagaaagtacctcaatgcattgttgttctttcggaacattccactgtaaattatcttcagtaagattttgctgtttctgtaagacttcactgcctcccaggcctaatgtataagccagaaggaactcagttttccagaaattaaggagcccattttaacctaaaatattggctttactcccaggttctcttaacttagccaatgatttttcctacctaagcacacaagaaaaatgaaaaaaggggtagaacacagaaatccctgtgaattttcaaaagccaaattttataacccctgcaatattactgcttactaccagttcctttctgacccagtcagatatacgaggcctctgactgggtccaagccagttaattcctggatcaaatctgttcctggacccagtccagtttctgtcatgactacaaacccagtttggatcagaaacttgctcgaagaaactcagagagctcaaaacacaaatctatggagcttcaaattccgagagggagcttaccgcgatccccagccgctctgagagatcaatggacacaggtgggacctgcaggtaccttgtgtgttcactcagcgctcctgggagtcactagaagctccacttcggatcctgcttctgacaccatctgataaaagaaaaacttcagccaaattaaatttaaaggagtttacctgagcaatgaatgattcgcaaatcgggcagcccctagaatcacagcagattcacaaattctccgggggtgcctcacagtcagaagaaatttacagacaaaaaaggtaaggtgacgtacaggaatcagaagtgaggaacagaaatagtgagactggttacaactcagcatttgccttatttgaacatttagcagtctatgagtagttgaagtatggctgctgggactggtcaacactcagttattgttacaggtgcatactactaagttaggttttcaattttatctgactcttacagttcatccacaaggactaaaatatggaagtatggagtccttctcaggctgtatttagtttgctttaacagatcaatatttctgaaagtatggtccccagaccagcagtgtcatcatcacctggttgttaaaaatgcaaattctcgggccccaccaatgatctactaaatcagaaaatctaggggtagtgcccaggagtctgttttaacaagacctccagaggttctggtgtaccctacagtttaagaatcactgacaaagatataaattggcagcttggttttatacttgacatattatgatgaacatccttacaagtcagtagataaaaccagatgtctctatttcttttcctttattctttatgcatatatacacatatataattgtgcattaacaggatcattttagaaatgttttggggtttcttattgcagcctgttttgttttacttgtcttcactcttccccttccccaatgccacctcctcccctcaagcaactcgtgttaacaacttagcatatgccattctgtattttccccattcttatctagcacataaaacacacccttagaggctagactttagattgcctgctttaagaaaaatgggattatattttatacattactctgcttatcagtttctcttccaaaaataccccatgaaactgtttccaaggtaactgttttagctctaaatctttctttgtaatggctgcatgatgtttcatgtatggatacaccatgatttattcattcatctcaatattgctggcattatgaataaagcataataaattaatatttttatgtatacacacatatatatgtatatatatatacacacacacatatatatgtgtatatatatatacacacacacatatatatgtgtatatatatatatacacacacatataccctgatgtatttatttctatagtatattctcctaagacaagatagccaggttgaaagtacatttctcatgttaaaaaatgtttccattgcatttcaaaaaaaaggatttaaattttacatttccactaattgtgtatgataagggctttctcccccatactgctatcagctataggtgttatcatttgattaaacttttgccaatctgataggagcaaagtgggaacccatttttcctcttctgtctgcttaattgatattttttaaaaatagacacattccatttggtgaggagctgcaagttccacagcatgcttttgatccttacttcacttcagtggacctctccataactcacttcataaagggagcagtattttccctttaaagcataatgagagtgggccctcttaaaattcctgtttagagaaatctagaaatctagattatctcttctgcgtgagctgaaagtcggacagtgcatcttatattattcatatgtaacctgcctcactccccagttctctctagagcctccattttcagaacctttctttctgccttcttctgctccacccattcccctgtttattttaaacctccagtatttcctttaaaaaatgattttaaactaagcttggaaaacagaatgcattctgttgcaacaacatttgttgataacactttagggctttagcaggtgaggtatgatgctggaagcccaatggcctcattgactgagtgcaaactagagtaggagggaccccagttcttcaaactggatacctctcccagtacagggctctgcctatccacttcccatccactagcacctaaagcaacctatagcagagagaagccctgtgggccctggcagatcctcatagaattgtgaggaactctggcttcccttccaaagtccaggagtccagggagcatcctgacctccctggcgttttttgagaggagtgtcactcactaaagaagattttggaagcctgggggcccagcagcaaccacgtatcagagcctacctgtctggttcttgagctctggaagtgggagattagagtccatcaacagcttacaaagactggagtccccgtgggtgcaccgctgggtcttcctctcatccagttggtgtttctgctggtttctgtcctagcattacagctaccctaggaacccactgcaggaggaaaataagacagttgaaggtgtcacagatgtagggatccaagtagtgattcactttaacaacttgcatttgattgcttagaatgtatgtaatatgcaatatatatgcaataccgctcctcattctgagggtgtttaatgtttcccttcaccaaaatgcagcatctagaccggcttatgaatcttccgctgcattccgtgaagatggaaccttgttatactaaagtcaacctgcttcacgagcgcctgcaggatctcaagagccgcttcagattcccccacattgatctggtggttcagaggacacagaactacatgcaggaggtgggtgtggcaggggcatccgtggtggatgagggtaaagagagagcagagaaatgggtgctggccagtgagaccagctgctagtgtagctcagggaaatacgtcgcgtctctttagccatcatgttgcgggaggacacgttctgtccctccactggcttcatcttccatccatgtggatgaacatcatagacaagacatagctcagaaaaataaagtagcattaattgataactacttgatttgtcaaatcagtgctgtaaccttggctacacattggaatcacctgggggaaatactgatgtccaggctggcgtgcagtggcatgatcttggctcactgcatgcaacctttgcctcccgggttcaagtgattgtcttgcctcaacttcctgagtagctgggactacaggcatgtgccaccatgtctggctaatttttgtatttttagtagagatggggtttttactgtgttggccaggctggtctcaaactcttgacctcaagtgaactgcccacctcggcctcccaaagtgctgggattacaggcataagccaccacacccagcctatatggctactttttgatagaacttccctaccctgattcctactgtttctaatatgcagccaggattgagagccactggcttaaattaattccctaacgtaattaagagtaaaccaatcaatcaatcacagcttcatatttgaatttcttgagtctacttgacaggtttcttttttttttttttcataaggaaccttttccccagtaacaggaatgaatagcacaaactccttccgtattatagtgtttcctaaatgaataaggggtacggtcaccaaagctctaaaggacaccatgccatttcacacagatattctgaggagagattactgtgggccggacactgtaccagatcccacttcagggagcttgagtgagacaaattcttagataaattcactacaatgttgaaggtatgataaaggtatatattgtggccaggcacagtggctcacgcctgtaatcccagcattttgggagaccgaggcgggtggatcacttgaagtcaggagtttaagaccagcctggccaacatggtgaaaccccatctctactaaaaatacaaaaaaattagctgggcatggtggtgcacacctgtagtcccagctacttggaggctgaagcacgagactcgcttgaaccctggaggcagaggttgcagtgaaccaagagtgtgccactgcactactccagcctggatgacaaagtgaaaccgtgtctcaaaaaaaaaaaaaaaaaaaaaggtatatattggatgctttgggaccacgggcttggggaagaaaggagaactttttttttcataaaggttatgggcaggattaagtgatacattttagctaactaacccttgagttgtgagggatgaaagaggaacgaggaacaaaattgggcaacagtttagcagaagtctctttcgtaatactggaccctggtgacgggaacacaggcaaaggtgcagagaataagatacctgaactacttctgctttctgacccatgaacatgtcagccactgtccccacccatccctgaccctgcctctcttcccagccctgcagagagagggagagataagctgtggagcggtttacatctacttaaagtggaggtgccaccaaaaactagttgaagaaggctccagcctcatcccttaatcagtggctgcaggtatcaaagaataggagtgcccacgggagatgacagaatgcttgctcagtcccatggccttgggttttccaacttcttcctgctcccactgtgaccacgtgaccatttgtttcacagccctggtgatggggtgatgttgccttgggtacccccaccgaatagcagccgaggggactcatctctgatggcccctactctgcagtcccacttagccaggcctgtgggtggtgatcccagcccctgactgttgtctgtttctgtgtcgcttctggtttctagctaatggagaatgcagtgttcacttttgagcagttgctttccccacatctccaaggagaggcctccaaaactgcagttgccattgagaaggttaaactccgagtcttaaaggtaaaaccgttctcttgtttgtgggaagcataaaaagagaacgtgacccctgtttcttttgtaaagtggaaaataccaagttctctccttggctctaatctttccccactcctttctctcccaagtccagtgactgtcagtccgctgcagtttctccagtgtgacttccatgcctcttctgccatctagcggccactgctggtcctcagcatcattacccacagctacaggccccgcgtcccagccttcatagagatccaactcgacaaacacgtattagctgtccactataagcactgcatgggatgtaaaagtaggcaaggcacagcctctttcttcaaagaggttacaatatagtaaaatccattaaactggcgaataatttattgattttgaaaaatcagaacctcatggcaaaggaaatactccaaagaaaagaaatctaccatatgaaattgttttaaatgtacttcagagtgtttattaaaatagttttaataataggagctttcacatatatgttatattttaaagcctcttacctgatccccacaagaacttgtgcattaactagaatattcccccattgtacagatgaggaactgattctgtaaaagctaatgtgacttaattaagctcaacaggctgatcaatggtgagcttaaggataaacgatcatacacctagtccactaattttttttactgccttctagttcccctaaacattgccttggaacagaagatcaaagtcccacagagcctaggggtggtctctgaatttcagacttgatcttgatgcctcacaggcaagaggaaactctagcaactaaatcattgatattaaaaacaatattggggccgggcacagtggctcacgcctgtaatcccagcactttgggaggccgaggcgggcagatcacgaggtcaggagatcgagaccatcctggctaacacggtgaaaccccgtctctactaaaaatacaaaaaactagccgggtgtggtggtgggcacctgtagtcctagctactcgggaggctgagacaggagaatggcgtgaacctgggaggtggagcttgcagtgagcggagattgtgccactatactccagctctgggtggcagagtgagactctatctcaaaaaacaaaaaacaaaaaaacaaaaaaaaaaacaccaatattgctcatgataacacacataatgatgaaattgcaatgcaactaaaaaaaaaaagatagtgtcagtgtcaaatgctttagcgtacagaaagaaaggaagaaaaaatgtagaaaggtgttgaaatattaggacctcaggtttcaaagagattttgagtgcctttagttcaacttcatattcagtgttcagcaggttccctcaaggggtggtcccactagtgctccgacacctgcactggcaggatactttctacctctcaggatagcccattttagttcttgacagcaagaacatgctttctcatgttaggccaaagttctcaccactggttattccagttctacccccttcattcataaccttcttccacgtggcagcctttggttgtttgaatagagttataacttgccctaacttattatctccagtataaacaccttcatctctttaactattcttcacttggcctgaccattcttctcgctgcctatgactatactcttatttatctgtgatccccttgaagtgagatccacaattaaatcctggtctccatgttgggatgtccaatgcagaacagacagaatcgtcatctttcttgttctggatactgaacttctttggttaacatgtcacagtgttaatggagccactagccaggccttctcttcccttgttcaaatcattacaacccactgaccctggtttgaagatgtggagtaatagatgatcatggtttccatggacctacctgggacaggagtaataaaatacaaactcaccccccagttctatccccaacttctttataatgcagaactcaccattctgttttgatcttgcctcagtttccatacctgtaaaaggtaagagtgagatgggtcattatcagttataacctgtgcctgcagtgtgagggaattacatggaaagatctctgaggccttggaaatacaagagttctcagacattaggaggaaaagagaggtgaagtgggtggctgagttttttgagtaaacataagtcaacagattgtaatgttactatttaacatatgtttctttattgacagcaatatgattatgacagcagcaccatccgaaagaagatatttcaagaggcactagttcaaatcacacttcccactgtgcagaaggcactggcgtccacatgcaaaccagtaaggggatgagttaccctaaagagcttgctcttcttacctctgaagttcaaacaagttcttttgtgatgtgtactggcaaacagcagactagaccagggagggattggcagacatttttgtaaatggtcagatagtaaatattttaagcttcatggactgcactatttctgttgcaactattcagctctgctgttgtagcacacaaacagccattgactatatataaacagactttatttgcaaaaacaagatgctagccagatatgctgacccctggactagacaaaatctcaaagggcagtgatctgaatttgagccaaactaggggttgacatagaatacctaaggataccaggtgtttctcattatagtatgactcataggtccaacgtgtcctctgaaacttgaccactgtatccaaaaaagatattagctaacataattacaggatatttgttctgttaaatccagcaatgttgtttaatgaaatcaatgaaaccacttaaaacctctacaaacattgagcatccagtgagagccatgattgcgagggtgtgacttcatctgtagagcagagcaatgggccagcagagactgaaaacagctctgggaggaggtattatttatatcctcatggtacaaatgaggaaacctgagtggttaagccactgagccgaggccacagacctggtgaccaccagagtgtgaacccagttcttgcttacctaaaacatgataggcactcagaaaatggtatcaagtactactaccactattattattactacttctacatttcaaaaataatctattaacctgaagcaaggcctgctccgttttggagcaaatgataaagaggtttttggaatttaaaaaagggctttttggcagctcggagagtctccaagcactggaacgttaaaatcctttgcataagttattttactgcaacatgtcattggtcatttttatagtctgtaagtgctgttttccttcacatcctcatagcgtattagatatatttggcatttatttgtggggcatatttctttcataggaaaggatttgattaagccaagggattgacctttggccttacatggcagaacagttcagcagccaaatgatgatggtgtccactgctaggtgggtttgcacacagatgttctgcttaggattttttttttcaatcacaaaggcagtttgggggcctcagatccaccttctctcaggagaaaggtaaggagagttctccttctcatcggctcccctctttccaagcatcaacatagtgtgctgtgcccaatctgtaagaggctcttgtaattttttaatcaggaggcattgatttcaaaagagcctgtgacccagaggttttggtaatggaggatattatatcagcatcaagagctttttaaaaatctggatttgcagaatagatgaatgaggggattatctgcttcctagaaggagtctttattttgctaaagtgcatttcccttggttctataagtagcagcttcctagatctgtggtactcagcctcagcccaagctgtgtattagaattgtctggggaactgtgaaaaaaatgattctgactccccaacacctaccttcagagataccaaattaattggcccagggaagtaaacctatggccctgttcaatcaattcaatataaaacacctgttttgtaaagttggtcacttcatgacagtatatatgtccatagaaagtactccttcccacagaattatttagctggttgaaaatttaaaggtctactgtttattgagtcagcaaatatgtattagatttgtatcacatgtgatccaggcattgtgccagcccagcatccctgaagtcctggagttcacagtagagagcaggagacaggcaaacaggatgccatgtgaggaacacagcagttgcctcatggggaagagttccaaggaaagtgccaaactctgcttatacagccaggaaggacttccagagtcatgctttcacccagtcctgagggatgaatgccaatcaggggaataggaatgggggaccacgtgggaaggatgaaagggtgttgcaggcatgaatctgtgcctctcatttagcagaggaagagacagaggcacagagcagtgatatggctcaccaaggtcccatgtctagtccagggcagtctccagtctcctgggcaatgcttttctcaaatctgtgcaacagtcctgcctctagaccctctaggggtctttgaagctcatgtctcttcaatcctttgcctttcttcttggttgggtataaaggaacccattattacccgctgtgatctgggctacagtgccccaaagtcccagcactgagagttgtctgaggtggtgcttctgatcacctgctgtaaatactgtccttccaggcaagagaccgcaaatcccatggctaagtccctgattctctaagagccacatgtgggaagccttcccccagcaccaccaggtgcaaggattactgagttaatcatgggatatgatttggtacattttgatccctgccctgtcctcatgccgataaaaggcaagccatttggaaacccttggaaaggagagagagttaagggatgcaccatgcctgagctatcctagaaggaatcaatgaatgtcagggccagctgaagagaaagagaatgtttctgaagagcccttgactacagagtctcccaacccccaaagtggccccattctgataaagttaagcatacatctaccctatgacccaacaacttcacttttaggtatatgcccaacataaacaagcccttaaatccacaaaaacatatgtacaagaatgttcacagcagttatatttatgattattatatggcgtagatatagttgcgccatatatctacaactatctgatctttgacaaacctgagaaaaacaagcaatggggaaaggattccctatttaataaatggtgctgggaaaactggctagccatatgtagaaagctgaaactggatcccttccttacaccttatacaaaaatcaattcaagatggattaaagacttaaatgttagacctaaaaccataaaaaccctagaagaaaacctaggcattaccattcaggacataggcatgggcaaggacttcatgtctaaaacgccaaaagcaatggcaacaaaagccaaaattgacaaatgggatctaattaaactaaagagcttctgcacagcaaaagaaactaccatcagagtgaacaggcaacccacaaaatgggagaaaattttcacaacctactcatctgacaaagggctaatatccagaatctacaatgaactcaaacaaatttacaagaaaaaaacaaacaaccccatcaaaaagtgggcaaaggacatgagcagacacttctcaaaagaagacatttatgcagccaaaaaacacatgaaaaaatgctcaccatcactggccatcagagaaatgcaaatcaaaaccacaatgagataccatctcacaccagttagaatggcaatcatggccgggcgcggtggctcacgcctgtaatcccagcactttgggaggccgaggcgggcggatcacgaggtcaggagatcgagaccatcctggctaacacggtgaaaccccgtctctactaaaaatacaaaaaattagctgggcgtggtagcgggcgcctgtagtcccagctactcgggaggctgaggcaggagaatggcttgaacccgggaggcggagcttgcagtgagcctagatcgcgccactgcactccagcctgggcgacagagcgagactccgtctcaaaaaaaaaaaaaaaaaaaaaaaaaaaagaatggcaatcattaaaaagtcaggaaacaacaggtgctggagaggatgtggagaaataggaacacttttactttgttggtgggactgtaaactagttcaaccattgtggaagtcagtgtggcgattcctcagggatctagaactagaaataccatttgacccagccatcccattactgggtatatacccaaaggactataaatcatgctgctataaagacacatgcacacatatgtttattgtggcactattcacaatagcaaagtcttggaaccaacccaaatgtccaacaatgatagactggattaagaaaatgtggcacatatacaccatggaatactatgtagccataaaaaatgatgagttcatgtcctttgtagggacatggatgaaattggaaatcatcattctcagtaaactatcgcaagaacaaaaaaccaaacaccgcatattctcactcataggtgggaattgaacaatgagaacacatggacacaggaaggggaacatcacactctggggactgttgtggggtggggggagaggggagggatagcactgggagatatacctaatgctagatgacgagtaagtgggtgcagcgcaccagcatggcacatgtatacatatgtaactaacctgcacattgtgcacatgtaccctaaaacttaaagtataataataataaaaaataaaataaaacaaaaattatatttatggttgaaaattgaaaaaaaatctcaatttttatcaacctgagtgcagataaacaatttttgtttatccatataatgaatactacttaacaataaaaaggaatgagctactgatagatgcagcaacatggatgaatctcaaaaacaaatgcaaaataattatgatttcatttctataaagttcaagaacaagcaaaaactatcatgataggtataaaatcagtgctcatatcttgggaggtgcagactggaaagtggggtgggggaactttgggggtgatggaaatgttctccttgatctgggttatggttacataagtatatttacatatttaaaatcattgagctgaacttatctgtacattttactatatataacttaccttggtaaagtgctattgtgattaaacaaaaaagaaagaaggaaacatcttggtgatgaggggaaaaaaggaggctccaaacctgctaatgaggccttgagatgataaaaaaaaatcactgctgtcttctcccatgaagtgcataaaatgcgtggccagtacaaggaaagggaaaggaaccaccaatggctgagtgagttccacaccttatcatggacagtaatagatgtgtcgaggtcaggcatggtgcctagacagtgaattgaattgaagggaacccaataaaatattattgaattgagtaatttgcccctgggccaacatggtccttctcttatgccctccaagaagagaatcatgagtgggaatcgtcctttctgtatctcctctaagaacaggcatctcatgccttttcatctttatcttctaatctcttgctctccaggagcttcagaaatacgagcagttcatctttgcagatcataccaatatgattcacgttgaaaatgtctatgaggagattttacatcagatcctgcttgatgaaactctgaaaggtaagaaaggttacctggtgctgcagggacactccatagaggggagcatccctgaaataggactctgtaaggccagtcagggaggaaaagagaagaggaaatggacattggtgagggagggagacagacagtgaggagagggaaggaaagaaggaaggatactaaccttgattgagtgttatgattaagcacacacaaagctggcactttagatgttattttccctttttaatacacaaatatgaatgctgtgagatgggaattttaagtttcattttacagatgagaaagttgaggcttagtgagattaaatctcgggtctctcatgaagagctgtcttcctcttgctattccagacagaacaaagggaaaagggcttttcttaggcacaggcttgtaactgcccctgccccccacccaccaaagctgagaagaggcaattccagcagcaaggcttattaatggctctctcaacacattcccagactccactcagccagacagaaaaaggtgcagggtgatgatgcagtgccacgcaagtctcggtgggactccggcatccagtatcctcaggaatcatgccttgcctgggattggattgtggataggaaaactttgtttaaaatatgctggagagggctgggcacagtgggtcacacctgtaatcccagcactttgggaggccaagatgggcagatcacttgaggtcaggagttcaagaccagcctggccaacatggtgaaactccatctctactaaaaatattaaaaaattagctgggcatggtggtgtacacctgtaatcccagctactccagaaggtgaggtaggagaatcgcttgaatccaggaggcagaggttccagtgagccaagattgtgccattgcactccagcctgggtgacagagtgagactcggtctcaaaaaaaaaaaaaaaaaaaagctggagaaggccaccatcaaactgtggacctgaaacatatctggtctccttttggaaggtcttgagtatcacaaaagaccttcctcaatgaaaactggccaaggacaagcccaaggtcctagtagctaattctagggaatccagtgagaccagcaatatgaagatgtcagcacagtgtctacacaaaggaagggctcggtcaaggccactgccagcccaccatgggcacttttgggtgatttagaaaaagactcctttcctccagacactttattgctgtctgttagaaaattgtcacaatatattgattttgttagagaaggaaactctgcagctagatgctgaaaagttatgccgaatacacaaatctgtactgtctttgatatgaatggcacccctgagatgtgatatttttgggcactacagcccctgcacagccataagtaggaggcctgtggtcaaaaatgtcacctgctgttgttgttgttgttattggatttgcccctctggaggcctttgaaactgagctagatgcacatggatcttcattttggccctctcctctgcatgtgcagtaccgagtacctattacacattcaggactgtactgcaaggtaaagcagataagtgtaaggcctggccctgccctagaggatttcagtccaggtggacaaactggagccacccatcttagcagctaataaaatgtgctggggcctccctgagggatacaggtgacactactgcagaccctgagtgtcttgaaaacaaaggctatagtttattcatctctggattcccagggcctgtcccatgttaaatgtcctgcaaatgtttgctgtttgaataaatgaatgaatgaatgctacagaggctcagagtttggaaagagtttatagactttggtcatcagggaaggctccctggatgtaagctgggtcttgaaatggagaaatttggatagccagagaggctgaaaggggactttggcttctcaataaaatcagaaaatcatgttttgttttctgatatctctcagtgataaaggaagctgctatcttgaagaaacacaacttatttgaagataacatggccttgcccagtgaaagtgtgtccagcttaacagatctaaagccccccacagggtcaaaccaggccagccctgccaggagagcttctgccattctgccaggagttctgggtagtgagaccctcagtaacgaagtattccaggagtcagaggaagagaagcagcctgaggtccctagctcgttggccaaaggagaaagcctttctctccctgggccaagcccacccccagatgggactgagcaggtgattatttcaagagtggatgaccccgtggtgaatcctgtggcaacagaggacacagcaggactcccgggcacatgctcatcagagctggagtttggagggacccttgaggatgaagaacccgcccaggaagagccagaacccatcactgcctcgggttctttgaaggcgctcagaaagttgctgacagcgtccgtggaagtaccagtggactctgctccagtgatggaagaagatacgaatggggagagccacgttccccaagaaaatgaagaagaagaggaaaaagagcccagtcaggcagctgccatccaccccgacaactgtgaagaaagtgaagtcagcgagagggaggcccaacctccctgtcccgaggcccatggggaggagttggggggatttccagaggtaggcagcccagcctctccgccagccagtggagggctcaccgaggagcccctggggcccatggagggggagctcccaggagaggcctgcacactcactgcccatgaaggaagagggggcaagtgtaccgaggaaggggatgcctcacagcaagagggctgcaccttaggttctgaccccatctgcctcagtgagagccaggtttctgaggaacaagaagagatgggagggcaaagcagcgcggcccaggccacggccagtgtgaatgcagaggagatcaaggtagcccgtattcatgagtgtcagtgggtggtggaggatgctccaaacccggatgtcctgctgtcacacaaagatgacgtgaaggagggagaaggtggtcaggagagtttcccagagctgccctcagaggagtgaaagggacaatttggctgaagtctttctctgaaaaaagccaaagggttataggggtacacttaggggttgcatgcaagctgttaccaaaaaatttttaagtattttcttaatttgaataataaaaccagaggaaatgcatacagggcatgagcaactgaggcaaacctttgtggacatgaattgttctacgatgaatttttgctttagtattttaataagaattacaaagacaatggcatacttggggtgagagggagctgaggatgtctgaggagggaatagtattgcagggaagactgagaaaacagtaggatgacagttttgagtatactctgcacttttcaattgtgcaatcttcttgtgcactttaaggctttttaattttgtttgagaatgcaaatgtatactgtaagtctacctttactatctactatgcctacttcaccatctcttaaggactcggcatttgtccacagtcagactgcaagagagggtaggtcatgaacagtcacccgtgctggctgtagcccccacagaggcaatcatgcccaatagattcaagagaagctaagcggaaatggagggtggaaggtgtgatctgtgggactgtctgggcctgttactcatcctgctatcaatttcttattaattaatcttgatgattcttattaattaatcacatttgcaggaaattcagatgaggcaagaaaattttattggcctgggtaagactgaaagcattccaaattaggcttagactgtgcaaagggcttagctaagttatcgagcttaaaacccgtcaattaaacaaacattatttgaacagttactgcatgccacgcactgtgttgggcttagtaataaaaaaaagaaaagataagtgcttgttctagcataaattaaaaggtccaagggaatttaatctggaagagaacatatgccaatttttaaactatgacagcttttttttttctctttccattcaaatagtcctggttcattcccagaagggcacaaaatgaatgaataaataaataaatgaataaagacaaaagccaaggtgtatgctctcaagttccaaagatgttatcaaaagctgaaatcatttgtttggtcattcagcaagctaattgagtctctgttatataccaagcactggggataccatggcgaaaaacaactttgttccttcctcctagaacttacattttaatggaaatagacaaaacacatcttcttaacggatggtgacctataaccattaatgttgaaaatggaagagacttgcttccaaaagattaaaaggagttgttcttttctccttcagaaaaataccagatcatttcctaaaatctccagtcccaagtattacatcgtggtttccctccccgactttttattttattttattctatttttttgagatggagtctcactctgtcgccaaggctggagtgcagtggtgtgatctcggctcactgcaacctccgcctcctgggttcaggagtttctcctctgtcagcgtcccaagtagctggaattacagccatgcggcaccattcccggctaatttttgtatttttggtagagatgggttttcaccatgttggccaggctggtctcaaactcctgatttcaagcgatccacccacctcgacttcccaaagtgctgggattacagcgtgagctacctggcccctccccaaattttaacatcagatctcaacatatttgttgagaacttgtttagatcatcactatcgagtaaatttatgtcagttctttagagcatttgcttcacacacagttcaaccatttaaccagaaattaaaatatcacccttttcagccctcccatgaagaatttctaggtcataaacatgaataatactcagtatatgtataatatcatatttaattgttgcaacttttcttggcgtgtttaaatcctcatgtctttgagggatcccaccacaggtgaaggaagtaaagaccacttctcccccagtctctgctttctgcagtgctcactcatatcctggcatttagcatggtgtgttgaaattaggtttacttcttgtctctccaagtggctcctctcttaaaagacagaaactagggtttagtcatcatttgtgcttcctgctagaaacccacagccttgaataatggcttcctgcctccttgagtcactttaatatccctggtgcataggacctggcatgcgtcaggctgctcgggaaatgtgggaactggacacccagaacactgctgtgctggggctatttggggcctgctgtcaggcagaaagacgttttgaattgggctttctgcccttgttgagttttctcttaagtaaagtccaaagtccaaggggcagatggccagatgcactgcccagtaaggcaggaagccaaagaggcagtgcccagccccacaaaggctgcccgactccctgggacagtagtgtggagtcccagcccaggctgacctcacaccggagcttcctagcttcctttctttgctcaatgcagggcttcttgcaccccctggaaagctaagagatttttttcaaccctaaaagagagtacctttcactgcattggatggatgaacatcagtgccctaactttatccatcatgtaggtcagggaggactgggcactatttggcaggatgtactccagaatataatcaaagaattttctgtacatatttcactaaagacaagtttttgggctggatgtggtagcttacacctataatcccagcactttgggaggctgaggtgagagggtcacttgagcccaggagttctagacaagcctgggaaacatagcaagatctcatccttacaaaaaataataatggtgtgtgcctgcagtcctagctacttgggtggttgaggcaggaggattgtttgagcgagggaagttgaggctgcagtgaactatgattttaccactgcactccagcttgggcaacaaaatgagaccctgtctcaaaaaaaaaaaaagttttctagaataagcaggatgattgtttaatttgaagatggaacaggaaactagagtgcatttaaaatactctgtcttcattttaacatgttgaatggaataactgcatatcaccatgagtttgttttgcttttcatacagacttgtatgtgtcatttgagtggtttccagattggagcgaggttattctgatctaaatgaacagcatttttttccttagcctctgtttgccactctgggtatctctcctatgggcaaagccattagaaatgcataaaacctcgagacatggtttttggcaaaaactccatgactttaaactagctcttttactactgacctttcacagagaaaaaatatttcccttgaaaaaaactgggcttgtcattttttcccttgtagctttaagcagagacataagtgccttgcattacacatagtaaactttctttaaaaaaaaaaaaaaaagattttggagactaccagggtaagattccaacttgtccaaaagctttctggccttacatattttattataaaaattctcaagtctggtaatcttctatgtcagagctagtgatttcaaaaggtttcacaattccccaagacaaaagtgattttcgttcattataataaggttaagtgatatgtgattcatagcaattttgatgtgaagaagggaaggacatcattgacttaataatagtatcagtcggtgcaacagttggcaacatgtgccttcacactttaccataaagagacgggtttgagggtttgccttctaaagtctgcaacttcaagaaaaaaaatcgacactgtggattgactttcccggtcactatataaagcaaataaacttaaaacactttgtaaccatgtatttactctgccaggtgcctatattccaataaaatgttcatccttg

SEQ ID NO: 218 - DNA, 4951 bp, Homo Sapiens
cgaaagcgctgagattttgtatttctaacaggctcccaggtaatgcttgggaagaactgttgcttcttggacagcaacacttacaaggcaacgtgatcttgagctccacctcgaaggatgtgagctgggaaagttccagctcacagagatttagtcacttgagaaatggtccacttcctccaaggtgtttcttggatgccccaaagggatgaaaacaagaagtgaccgtgggcgaggaggaggagctggccgacctcctcggttgccagcccgtcggagctcaccagctaggcgagggcgggaagacagcccccgggccggcccacggatcatcagaaggcgcggacctggaggaggcgccccagaaggcgacgcctcttgcctcctgtctctcgcctctcgaaggaagtttgctcttaatttcagagccgggttcgccgtcggatcaacctccaggagctagcagcgggcgcggaccgggcagtttccgcgctcagcacaggcagctcgcggtcatgggcggctcagcctccagccagctggacgagggcaagtgcgcttacatccgagggaaaactgaggctgccatcaaaaacttcagtccctactacagtcgtcagtactctgtggctttctgcaatcacgtgcgcactgaagtagaacagcaaagagatttaacgtcacagtttttgaagaccaagccaccattggcgcctggaactattttgtatgaagcagagctatcacaattttctgaagacataaagaagtggaaggagagatacgttgtagttaaaaatgattatgctgtggagagctatgagaataaagaggcctatcagagaggagctgctcctaaatgtcgaattcttccagccggtggcaaggtgttaacctcagaagatgaatataatctgttgtctgacaggcatttcccagaccctcttgcctccagtgagaaggagaacactcagccctttgtggtcctgcccaaggaattcccagtgtacctgtggcagcccttcttcagacacggctacttctgcttccacgaggctgctgaccagaagaggtttagtgccctcctgagtgactgcgtcaggcatctcaatcatgattacatgaagcagatgacatttgaagcccaagcctttttagaagctgtgcaattcttccgacaggagaagggtcactatggttcctgggaaatgatcactggggatgaaatccagatcctgagtaacctggtgatggaggagctcctgcccactcttcagacagacctgctgcctaagatgaaggggaagaagaatgacagaaagaggacgtggcttggtctcctcgaggaggcctacaccctggttcagcatcaagtttcagaaggattaagtgccttgaaggaggaatgcagagctctgacaaagggcctggaaggaacgatccgttctgacatggatcagattgtgaactcaaagaactatttaattggaaagatcaaagcgatggtggcccagccggcggagaaaagctgcttggagagtgtgcagccattcctggcatccatcctggaggagctcatgggaccagtgagctcgggattcagtgaagtacgtgtactctttgagaaagaggtgaatgaagtcagccagaacttccagaccaccaaagacagtgtccagctaaaggagcatctagaccggcttatgaatcttccgctgcattccgtgaagatggaaccttgttatactaaagtcaacctgcttcacgagcgcctgcaggatctcaagagccgcttcagattcccccacattgatctggtggttcagaggacacagaactacatgcaggagctaatggagaatgcagtgttcacttttgagcagttgctttccccacatctccaaggagaggcctccaaaactgcagttgccattgagaaggttaaactccgagtcttaaagcaatatgattatgacagcagcaccatccgaaagaagatatttcaagaggcactagttcaaatcacacttcccactgtgcagaaggcactggcgtccacatgcaaaccagagcttcagaaatacgagcagttcatctttgcagatcataccaatatgattcacgttgaaaatgtctatgaggagattttacatcagatcctgcttgatgaaactctgaaagtgataaaggaagctgctatcttgaagaaacacaacttatttgaagataacatggccttgcccagtgaaagtgtgtccagcttaacagatctaaagccccccacagggtcaaaccaggccagccctgccaggagagcttctgccattctgccaggagttctgggtagtgagaccctcagtaacgaagtattccaggagtcagaggaagagaagcagcctgaggtccctagctcgttggccaaaggagaaagcctttctctccctgggccaagcccacccccagatgggactgagcaggtgattatttcaagagtggatgaccccgtggtgaatcctgtggcaacagaggacacagcaggactcccgggcacatgctcatcagagctggagtttggagggacccttgaggatgaagaacccgcccaggaagagccagaacccatcactgcctcgggttctttgaaggcgctcagaaagttgctgacagcgtccgtggaagtaccagtggactctgctccagtgatggaagaagatacgaatggggagagccacgttccccaagaaaatgaagaagaagaggaaaaagagcccagtcaggcagctgccatccaccccgacaactgtgaagaaagtgaagtcagcgagagggaggcccaacctccctgtcccgaggcccatggggaggagttggggggatttccagaggtaggcagcccagcctctccgccagccagtggagggctcaccgaggagcccctggggcccatggagggggagctcccaggagaggcctgcacactcactgcccatgaaggaagagggggcaagtgtaccgaggaaggggatgcctcacagcaagagggctgcaccttaggttctgaccccatctgcctcagtgagagccaggtttctgaggaacaagaagagatgggagggcaaagcagcgcggcccaggccacggccagtgtgaatgcagaggagatcaaggtagcccgtattcatgagtgtcagtgggtggtggaggatgctccaaacccggatgtcctgctgtcacacaaagatgacgtgaaggagggagaaggtggtcaggagagtttcccagagctgccctcagaggagtgaaagggacaatttggctgaagtctttctctgaaaaaagccaaagggttataggggtacacttaggggttgcatgcaagctgttaccaaaaaatttttaagtattttcttaatttgaataataaaaccagaggaaatgcatacagggcatgagcaactgaggcaaacctttgtggacatgaattgttctacgatgaatttttgctttagtattttaataagaattacaaagacaatggcatacttggggtgagagggagctgaggatgtctgaggagggaatagtattgcagggaagactgagaaaacagtaggatgacagttttgagtatactctgcacttttcaattgtgcaatcttcttgtgcactttaaggctttttaattttgtttgagaatgcaaatgtatactgtaagtctacctttactatctactatgcctacttcaccatctcttaaggactcggcatttgtccacagtcagactgcaagagagggtaggtcatgaacagtcacccgtgctggctgtagcccccacagaggcaatcatgcccaatagattcaagagaagctaagcggaaatggagggtggaaggtgtgatctgtgggactgtctgggcctgttactcatcctgctatcaatttcttattaattaatcttgatgattcttattaattaatcacatttgcaggaaattcagatgaggcaagaaaattttattggcctgggtaagactgaaagcattccaaattaggcttagactgtgcaaagggcttagctaagttatcgagcttaaaacccgtcaattaaacaaacattatttgaacagttactgcatgccacgcactgtgttgggcttagtaataaaaaaaaaaaaaaaaaaagttttctagaataagcaggatgattgtttaatttgaagatggaacaggaaactagagtgcatttaaaatactctgtcttcattttaacatgttgaatggaataactgcatatcaccatgagtttgttttgcttttcatacagacttgtatgtgtcatttgagtggtttccagattggagcgaggttattctgatctaaatgaacagcatttttttccttagcctctgtttgccactctgggtatctctcctatgggcaaagccattagaaatgcataaaacctcgagacatggtttttggcaaaaactccatgactttaaactagctcttttactactgacctttcacagagaaaaaatatttcccttgaaaaaaactgggcttgtcattttttcccttgtagctttaagcagagacataagtgccttgcattacacatagtaaactttctttaaaaaaaaaaaaaaaagattttggagactaccagggtaagattccaacttgtccaaaagctttctggccttacatattttattataaaaattctcaagtctggtaatcttctatgtcagagctagtgatttcaaaaggtttcacaattccccaagacaaaagtgattttcgttcattataataaggttaagtgatatgtgattcatagcaattttgatgtgaagaagggaaggacatcattgacttaataatagtatcagtcggtgcaacagttggcaacatgtgccttcacactttaccataaagagacgggtt

SEQ ID NO: 219 - protein, 928 aa, Homo Sapiens
MGGSASSQLDEGKCAYIRGKTEAAIKNFSPYYSRQYSVAFCNHVRTEVEQQRDLTSQFLKTKPPLAPGTILYEAELSQFSEDIKKWKERYVVVKNDYAVESYENKEAYQRGAAPKCRILPAGGKVLTSEDEYNLLSDRHFPDPLASSEKENTQPFVVLPKEFPVYLWQPFFRHGYFCFHEAADQKRFSALLSDCVRHLNHDYMKQMTFEAQAFLEAVQFFRQEKGHYGSWEMITGDEIQILSNLVMEELLPTLQTDLLPKMKGKKNDRKRTWLGLLEEAYTLVQHQVSEGLSALKEECRALTKGLEGTIRSDMDQIVNSKNYLIGKIKAMVAQPAEKSCLESVQPFLASILEELMGPVSSGFSEVRVLFEKEVNEVSQNFQTTKDSVQLKEHLDRLMNLPLHSVKMEPCYTKVNLLHERLQDLKSRFRFPHIDLVVQRTQNYMQELMENAVFTFEQLLSPHLQGEASKTAVAIEKVKLRVLKQYDYDSSTIRKKIFQEALVQITLPTVQKALASTCKPELQKYEQFIFADHTNMIHVENVYEEILHQILLDETLKVIKEAAILKKHNLFEDNMALPSESVSSLTDLKPPTGSNQASPARRASAILPGVLGSETLSNEVFQESEEEKQPEVPSSLAKGESLSLPGPSPPPDGTEQVIISRVDDPVVNPVATEDTAGLPGTCSSELEFGGTLEDEEPAQEEPEPITASGSLKALRKLLTASVEVPVDSAPVMEEDTNGESHVPQENEEEEEKEPSQAAAIHPDNCEESEVSEREAQPPCPEAHGEELGGFPEVGSPASPPASGGLTEEPLGPMEGELPGEACTLTAHEGRGGKCTEEGDASQQEGCTLGSDPICLSESQVSEEQEEMGGQSSAAQATASVNAEEIKVARIHECQWVVEDAPNPDVLLSHKDDVKEGEGGQESFPELPSEE

SEQ ID NO: 220 - DNA, 7243 bp, Homo Sapiens
cgaaagcgctgagattttgtatttctaacaggctcccaggtaatgcttgggaagaactgttgcttcttggacagcaacacttacaaggcaacgtgatcttgagctccacctcgaaggatgtgagctgggaaagttccagctcacagagatttagtcacttgagaaatggtccacttcctccaaggtgtttcttggatgccccaaagggatgaaaacaagaagtgaccgtgggcgaggaggaggagctggccgacctcctcggttgccagcccgtcggagctcaccagctaggcgagggcgggaagacagcccccgggccggcccacggatcatcagaaggcgcggacctggaggaggcgccccagaaggcgacgcctcttgcctcctgtctctcgcctctcgaaggaagtttgctcttaatttcagagccgggttcgccgtcggatcaacctccaggagctagcagcgggcgcggaccgggcagtttccgcgctcagcacaggcagctcgcggtcatgggcggctcagcctccagccagctggacgagggcaagtgcgcttacatccgagggaaaactgaggctgccatcaaaaacttcagtccctactacagtcgtcagtactctgtggctttctgcaatcacgtgcgcactgaagtagaacagcaaagagatttaacgtcacagtttttgaagaccaagccaccattggcgcctggaactattttgtatgaagcagagctatcacaattttctgaagacataaagaagtggaaggagagatacgttgtagttaaaaatgattatgctgtggagagctatgagaataaagaggcctatcagagaggagctgctcctaaatgtcgaattcttccagccggtggcaaggtgttaacctcagaagatgaatataatctgttgtctgacaggcatttcccagaccctcttgcctccagtgagaaggagaacactcagccctttgtggtcctgcccaaggaattcccagtgtacctgtggcagcccttcttcagacacggctacttctgcttccacgaggctgctgaccagaagaggtttagtgccctcctgagtgactgcgtcaggcatctcaatcatgattacatgaagcagatgacatttgaagcccaagcctttttagaagctgtgcaattcttccgacaggagaagggtcactatggttcctgggaaatgatcactggggatgaaatccagatcctgagtaacctggtgatggaggagctcctgcccactcttcagacagacctgctgcctaagatgaaggggaagaagaatgacagaaagaggacgtggcttggtctcctcgaggaggcctacaccctggttcagcatcaagtttcagaaggattaagtgccttgaaggaggaatgcagagctctgacaaagggcctggaaggaacgatccgttctgacatggatcagattgtgaactcaaagaactatttaattggaaagatcaaagcgatggtggcccagccggcggagaaaagctgcttggagagtgtgcagccattcctggcatccatcctggaggagctcatgggaccagtgagctcgggattcagtgaagtacgtgtactctttgagaaagaggtgaatgaagtcagccagaacttccagaccaccaaagacagtgtccagctaaaggagcatctagaccggcttatgaatcttccgctgcattccgtgaagatggaaccttgttatactaaagtcaacctgcttcacgagcgcctgcaggatctcaagagccgcttcagattcccccacattgatctggtggttcagaggacacagaactacatgcaggagctaatggagaatgcagtgttcacttttgagcagttgctttccccacatctccaaggagaggcctccaaaactgcagttgccattgagaaggttaaactccgagtcttaaagcaatatgattatgacagcagcaccatccgaaagaagatatttcaagaggcactagttcaaatcacacttcccactgtgcagaaggcactggcgtccacatgcaaaccagagcttcagaaatacgagcagttcatctttgcagatcataccaatatgattcacgttgaaaatgtctatgaggagattttacatcagatcctgcttgatgaaactctgaaagtgataaaggaagctgctatcttgaagaaacacaacttatttgaagataacatggccttgcccagtgaaagtgtgtccagcttaacagatctaaagccccccacagggtcaaaccaggccagccctgccaggagagcttctgccattctgccaggagttctgggtagtgagaccctcagtaacgaagtattccaggagtcagaggaagagaagcagcctgaggtccctagctcgttggccaaaggagaaagcctttctctccctgggccaagcccacccccagatgggactgagcaggtgattatttcaagagtggatgaccccgtggtgaatcctgtggcaacagaggacacagcaggactcccgggcacatgctcatcagagctggagtttggagggacccttgaggatgaagaacccgcccaggaagagccagaacccatcactgcctcgggttctttgaaggcgctcagaaagttgctgacagcgtccgtggaagtaccagtggactctgctccagtgatggaagaagatacgaatggggagagccacgttccccaagaaaatgaagaagaagaggaaaaagagcccagtcaggcagctgccatccaccccgacaactgtgaagaaagtgaagtcagcgagagggaggcccaacctccctgtcccgaggcccatggggaggagttggggggatttccagaggtaggcagcccagcctctccgccagccagtggagggctcaccgaggagcccctggggcccatggagggggagctcccaggagaggcctgcacactcactgcccatgaaggaagagggggcaagtgtaccgaggaaggggatgcctcacagcaagagggctgcaccttaggttctgaccccatctgcctcagtgagagccaggtttctgaggaacaagaagagatgggagggcaaagcagcgcggcccaggccacggccagtgtgaatgcagaggagatcaaggtagcccgtattcatgagtgtcagtgggtggtggaggatgctccaaacccggatgtcctgctgtcacacaaagatgacgtgaaggagggagaaggtggtcaggagagtttcccagagctgccctcagaggagtgaaagggacaatttggctgaagtctttctctgaaaaaagccaaagggttataggggtacacttaggggttgcatgcaagctgttaccaaaaaatttttaagtattttcttaatttgaataataaaaccagaggaaatgcatacagggcatgagcaactgaggcaaacctttgtggacatgaattgttctacgatgaatttttgctttagtattttaataagaattacaaagacaatggcatacttggggtgagagggagctgaggatgtctgaggagggaatagtattgcagggaagactgagaaaacagtaggatgacagttttgagtatactctgcacttttcaattgtgcaatcttcttgtgcactttaaggctttttaattttgtttgagaatgcaaatgtatactgtaagtctacctttactatctactatgcctacttcaccatctcttaaggactcggcatttgtccacagtcagactgcaagagagggtaggtcatgaacagtcacccgtgctggctgtagcccccacagaggcaatcatgcccaatagattcaagagaagctaagcggaaatggagggtggaaggtgtgatctgtgggactgtctgggcctgttactcatcctgctatcaatttcttattaattaatcttgatgattcttattaattaatcacatttgcaggaaattcagatgaggcaagaaaattttattggcctgggtaagactgaaagcattccaaattaggcttagactgtgcaaagggcttagctaagttatcgagcttaaaacccgtcaattaaacaaacattatttgaacagttactgcatgccacgcactgtgttgggcttagtaataaaaaaaagaaaagataagtgcttgttctagcataaattaaaaggtccaagggaatttaatctggaagagaacatatgccaatttttaaactatgacagcttttttttttctctttccattcaaatagtcctggttcattcccagaagggcacaaaatgaatgaataaataaataaatgaataaagacaaaagccaaggtgtatgctctcaagttccaaagatgttatcaaaagctgaaatcatttgtttggtcattcagcaagctaattgagtctctgttatataccaagcactggggataccatggcgaaaaacaactttgttccttcctcctagaacttacattttaatggaaatagacaaaacacatcttcttaacggatggtgacctataaccattaatgttgaaaatggaagagacttgcttccaaaagattaaaaggagttgttcttttctccttcagaaaaataccagatcatttcctaaaatctccagtcccaagtattacatcgtggtttccctccccgactttttattttattttattctatttttttgagatggagtctcactctgtcgccaaggctggagtgcagtggtgtgatctcggctcactgcaacctccgcctcctgggttcaggagtttctcctctgtcagcgtcccaagtagctggaattacagccatgcggcaccattcccggctaatttttgtatttttggtagagatgggttttcaccatgttggccaggctggtctcaaactcctgatttcaagcgatccacccacctcgacttcccaaagtgctgggattacagcgtgagctacctggcccctccccaaattttaacatcagatctcaacatatttgttgagaacttgtttagatcatcactatcgagtaaatttatgtcagttctttagagcatttgcttcacacacagttcaaccatttaaccagaaattaaaatatcacccttttcagccctcccatgaagaatttctaggtcataaacatgaataatactcagtatatgtataatatcatatttaattgttgcaacttttcttggcgtgtttaaatcctcatgtctttgagggatcccaccacaggtgaaggaagtaaagaccacttctcccccagtctctgctttctgcagtgctcactcatatcctggcatttagcatggtgtgttgaaattaggtttacttcttgtctctccaagtggctcctctcttaaaagacagaaactagggtttagtcatcatttgtgcttcctgctagaaacccacagccttgaataatggcttcctgcctccttgagtcactttaatatccctggtgcataggacctggcatgcgtcaggctgctcgggaaatgtgggaactggacacccagaacactgctgtgctggggctatttggggcctgctgtcaggcagaaagacgttttgaattgggctttctgcccttgttgagttttctcttaagtaaagtccaaagtccaaggggcagatggccagatgcactgcccagtaaggcaggaagccaaagaggcagtgcccagccccacaaaggctgcccgactccctgggacagtagtgtggagtcccagcccaggctgacctcacaccggagcttcctagcttcctttctttgctcaatgcagggcttcttgcaccccctggaaagctaagagatttttttcaaccctaaaagagagtacctttcactgcattggatggatgaacatcagtgccctaactttatccatcatgtaggtcagggaggactgggcactatttggcaggatgtactccagaatataatcaaagaattttctgtacatatttcactaaagacaagtttttgggctggatgtggtagcttacacctataatcccagcactttgggaggctgaggtgagagggtcacttgagcccaggagttctagacaagcctgggaaacatagcaagatctcatccttacaaaaaataataatggtgtgtgcctgcagtcctagctacttgggtggttgaggcaggaggattgtttgagcgagggaagttgaggctgcagtgaactatgattttaccactgcactccagcttgggcaacaaaatgagaccctgtctcaaaaaaaaaaaaagttttctagaataagcaggatgattgtttaatttgaagatggaacaggaaactagagtgcatttaaaatactctgtcttcattttaacatgttgaatggaataactgcatatcaccatgagtttgttttgcttttcatacagacttgtatgtgtcatttgagtggtttccagattggagcgaggttattctgatctaaatgaacagcatttttttccttagcctctgtttgccactctgggtatctctcctatgggcaaagccattagaaatgcataaaacctcgagacatggtttttggcaaaaactccatgactttaaactagctcttttactactgacctttcacagagaaaaaatatttcccttgaaaaaaactgggcttgtcattttttcccttgtagctttaagcagagacataagtgccttgcattacacatagtaaactttctttaaaaaaaaaaaaaaaagattttggagactaccagggtaagattccaacttgtccaaaagctttctggccttacatattttattataaaaattctcaagtctggtaatcttctatgtcagagctagtgatttcaaaaggtttcacaattccccaagacaaaagtgattttcgttcattataataaggttaagtgatatgtgattcatagcaattttgatgtgaagaagggaaggacatcattgacttaataatagtatcagtcggtgcaacagttggcaacatgtgccttcacactttaccataaagagacgggtttgagggtttgccttctaaagtctgcaacttcaagaaaaaaaatcgacactgtggattgactttcccggtcactatataaagcaaataaacttaaaacactttgtaaccatgtatttactctgccaggtgcctatattccaataaaatgttcatccttg

SEQ ID NO: 221 - protein, 928 aa, Homo Sapiens; identical to SEQ ID NO: 219

SEQ ID NO: 222 - DNA, 107622 bp, Mus Musculus
  misc_feature (1)...(107622): n = A,T,C or G
cggtcgcgcgcggcggcggcggcggcagtcgggcagcaaggcgcgtgggaagcgcggggacccggagccgggccagagagacgccccgaccgcctcggagcagggcgcaccatgcagcgtccgtgtgccggaaagaaaactgagaatgaaattactttggcaagctaaaatggtaacgccagctccccgccttcccctgacgcttctctgctgggggactcgtcccatctcccgctttctcgggccgggttgttggagcactgtctaactgatcagagccacccggaccccactctctaagaggagctttctcattctgctttgtgtccttcccctctctgtgcctcttctccctagaaacgatgcctgtgttctcaggcatcgcctgcggggtgtctgggacaggcagatgcgtgtcaggagagcagaacttggaaaggacagaactcagtctgggggagcggcgccgcgctctgcttcccagcggcagccctttaacacagatccgaggtttagctggcgacatggctatccagggggtcgctgtgtaaatttcagtggaagctgcatgaagatgttttgctttctcggcacttgccagaggggcttttcttttcttttcttttcttttcttttcttttcttttcttttcttttccttttttctttctggaaataaaaactttccataccccacataacttttttttgggtttcaaaatagtaagaggagaaaaagaggtacaacttcacttcccaaagagggctcttggtattaaaacacttgtttgagggagtttaacatcgacattgctcaaatgtttgtgtactttgagaagtataaactcttgtttttgcaaatgagttattttttcctttcacttaagtggacagagttgatcaggactaaaccacagtttccttaagaaggaaaaaaaaaaacttgaaaagatgatttaagatacgtggctaggttaggaaaagtaactgaccagagaagggagaagtcggaggctcctgataccgcaggaaaaggctgccagccaagaaaatctcagccttgcctattgcagggtgtcctgtgttgctctgtttggaggatttactcaaaggcttggagagcctttgtaagcagggaagcagctgggatagattgtggttagccaagggggaagaaaacaacaacacacactacgaccctctttttctttctttttatcctgtccctggcagagctcgattcaggactggggtgaagaggtagaggaaggagctgtttaccatgtcaccctcaaaagagtccagattcaacaggcggccaataaaggagcgagatggctaggggtgagtagcgcttccgagatcttgaactttggaacagtgtctttgctcttctgtgaatatcattattatttagccaaggtagccccccccatcccctttttctcccccttagtcttaaaaaggaaactgctgatggccaagtgtttgctctagctggacaggtctgttttaggacttgtgttttcctaagcatcttccctaagtctgtcaataattcagaaccttccggaaacatcttgaggtatttggcaaacaggctgggggtgttgtggcagaagaggacagacacacagagacctggtcagagagcactactagcttctacatgtgtcataaaccgctgtgcccagaagataaccttttctctctctcctccttacacagtgatgccaacagcccagtccccactcccagaagttcagaggccattcagacccgcttcctttgaggggcggcaaggtttcccattgtgacctcctttctgtagaatgggagtagactgatatatacttagtcttggggctttgcctgtagagtatggagtcggtggcagacactcggaaaaaatctgctttccataaactattggggaaggtcatgtgagttcttaattcgaccaatgaatctttcaacacatcccaaatgaagggactatgcaaggcagagagcctggcggtgggatcaggaacatgtgggagagtggagagagagtagttacagatgacacagggaggaacatagcggtgtctgaagagaggcaggacttgtgggtaatggtcttcaaagcactgaggagtgtgtgcttgcatcgcagcctactaaccttagtttcagagcacacagggtttggagcagtgttcccagatgagtgcggagtgcacggggcttcctgggaggagcggaggcaatatgacttgtaagactcatagtcaaaggcaggaagccaggagccctatcttccttagccgtggctgctgacattggatctcccccaacccccgcattgaccttctcaacctgccttaagtcaggattttcctgccactatgcttggatcaggacactgttgaccgggatggtaagttgctagtgacattgaagatgtagtctgcaaagttaggcactttctcagtgaacactagaggtctttacttactgagcaagcaccttactcagaacatgatcctaacattaactgtgtttagactgctgaccaaccactctgttgcttttgggggctttatgtatatatacagtatttcaatgtgatgttgctatggttttgacctgtgtggctatttgtaaatgattaataagctctaaaccagttgccttcaaatagactttgcatttattggtgttgggtagccctggctgtcctggaactagctctgtggaccaggctggcttcaaactcagagattcacctccctctgccttctgagtgctgcaattaaaggcatgcaccactgtgacaggcttttctactctttctaacgatgtaaaatgctgcatgggtggcagtgttaatatttagccagatatggtagcaatgactgtagtgtgagcaatagaggggaccctacccccaataaaccgtccttcctttagatgccagaagtcattagtgactcttaccagttattctgctcattgactccacttcccttctcatcctgcctctctccatagccatatagagttcagaggggttggctctgacgtaaactgtagatctgaaatattgagaagaaagatcatgtaagcttgtttttggttcatagaggaatcctatcctcctccttttgaacaaatgactcacagacaccacactgctcatcaaaagtcagtccttggacctctcagcctgggatgccacttgatttcttgtcttaggtatcctgtgaggaagctctgttttttttttgtccttgaaaaatcccagcttaatttaatatgactcaaccaattgagccacagcaattatgaaatccttttctttggtacccagttggcttcctcgtgtttgttttcctacattccagtaacccattcagaattcttcaaagtgaacacttttagagttaatggggttgaggtaaggcagggaagacgcttcgtgcgcactggcatctgacaacaactttatggggaaggtggtattatgatgctgtctttcatctttatatacaaagaaaataatgcccagcgtgatctgcccgcttgcctgtggggtcatgtagttaagaaatagtagaggctaaatttgtatatgggtacaaatttgttgtcaagaactgtccagggctttaaggctgttcccgtagttcttgaggatagcgttggtgtacaagaacaaggagactagagcatacctcccctagggataattcttggtgtgggatttgaaaaacgtagccctctggtcctctttatgctttgaatgataacctgagctgtaaattataaggtgtgttatggtgatgtgtatctaattgataagctcgacacttgggatgtgtaaagtggcacatgaaagatgtgtatgaggttctatagcatgtgagtgtaggcggagtcttggtgttgtgtctggagtgctcttcaaaaagcttaatgcctgcgagcctagcactcaggaacatcaggaattcaaggccatcctctgctacatagtgatttaaagaccagcctgggctgcacaaaacccctctaaacagaagcagcagcagcagcagcagcagcagccctaaaccaaaccaagtttcaaaagatggagtataatttttctatttttctagtgctaaaatctcaggataattaatactcagttctaggaagtgaagctaaataattacatgcttgagtcagaaagatggccagttgttaaaagcacttgttgctccagcagagaacctgggtttggttctcagaacccacatggtggctctctaccatctgtaattctagttcccggggcatctagtgccttcttctgacctcagtgggcaccaggcacacatgcaaatcacataccttcatgcaggcgaaacacccatacacttaaaactaatacatctaaataaggtaatgagaacataaacccaaacacataagtcatacaattctattttgattaagtttgtgcttagtttgtgatcattttaggaaattactatgtcagtcctaagatagatgctgaggatgatctaggcctggtttacttacacatacaatggtagcctggcccactggcaatgctgtcagtgtatattgacaatagcattacatttttgacctaccttttctttacaatgatatctaagttgggccgttctgtcgacttgaaactctcacaggaaagtgacttcagctacaacacagaaacataaaggtccaggactggaagagacattaaaaattagttttatttaactactctcttagtttgtagaattttggaaaggcaaatggtcaacttgtgctatttgtcttcgatgccagtactgtggtgtacctccacagtgacaggaacaaaggaattgagaaataccagtgttccctgaagcaggaaaagtacattttagacaaaggccttgaagggacaaaacaaaagaattcagggaaggagctttggagtcttcaaaacaggacagattgatggtgcagaaaaccgtgtcacacttaggataagcttaacattggattgttaggaatgggttccctgtgcgttgtctttggggagtggcctgggccagcagctactcttgtcattcttctcacttgtatactgcagtcatgtgaacctgcgtagggccctagtgactccttcccagtgcctggggcttgtcacactcttgtacacttcaactcttgatgagtttttgttaggatgagttggatttttgataagtaggagactggcagaaaccagttagctagaagagaatagactatagataaaggacatggagagagatggcctgaggcccacctttgggtttttgggagtgccttggtgaatgttggcgatgtctgcatcgagtgggttgcaccctttgcctcgactctacccgatagcttagtggttctgctgtgtacattgccttcatgtggggaaattctttgagttgtcagctacctctcttctgggactcttctttgacactcaccgccccctccctccccgggtagatgagctgggcctttctgtgctcctgagcattctggtgtcgtgttacatgtttcccttatgctgctgtaattatctgtttatattccccactagataatatcttataactacagccaataaaagtttgctgagtggatgaatcaggcttcatcctttttgggggggactcatattatcccgataaatataaatgtatggctgtttctctttaaagccaaatcacgattaagatgtcatcctataaggaggagcagaggggtgtaggagcaagaaaaatcaattaggtaatgattctggctgtctcaacattctttctggaacagtgcagggcacacacaaagatagtgattattcctttgaacaaaataaaatttcccagtgccttttaaaaccacaagctctgattgtgcttgcctacttgggggctgttgaagaaagaagggcgagacaggggttaaaaagtcctggcaagcattacagttctgtgtggctggagagagcgggagtgggactgtggaactgaaaggagataagcccctgaggggcctctggtttactgctgctcatccttgtcttccttaggaaaacaggccttgggttgggctgttcctgtctgttggaatgcttagtttaggctctacaaagtcaagctcaaaatttagcaaccatttgaaaactaagtaactggtatttttcattttgactttgggaacgtatttctcaaataattagtctaaactgtgttagcctgcaccgaccgagaacacacaggccattcaaactgcctgagacatgggtatctcatcattgttttcaaagtctctcgggatctatatatgatagctaattaagaatatccatttcctttagtcaacccagagaatttagctttaaaaaaaatgcatgtctaggggctagagagatggtttagcagttaagaacagtggctactctttcagatgatctgggtttgattcccagctccacatggaacctcacaaccctctgtaactccagtcccagagtatccatcgccctcttctgggctctttgggtactgcatgcatgtggtaggcatacacataggcaaaacatacatacctaaaaataaataaaatgttcacaaatactagaaaaatacatgtctacctctagcaaagaagaacagcataaaccttagaggcatattaagtctttctttctttctttctttctttctttctttctttctttctttctttctttctttctttctactgaaaagtataatcttattcctattacagacgtatttcttacttctctaatgctataaggtaaaagccccctggagtttaaaattgggaaagtaaaggagaggtaagtggaggcctctgcaggtcactcactgttgggatctctcagtgcactggcctgtttgtttctgtctcgtttatccccagcgtacatttcctttcaaacttcctgttctaagttatcagactttaccataactgtcacatgcatgctacattagaatactcaaaaagttaagcgaaccatctaggccacggtgttcgtcttagcagaaaaggctgattcctataaacagcaaggcaaggagtggaaatgtggagaggtcattaaagctgcctcattctctcagagagacgcagccagcagcctgtctctggccggccaatgggtgtggccagctccacagagttgatttggggttctctggagtttctgggtcatttgtgggtaaacacaatcctcgtgagatctcttgctggtcttgtatatcgcctgtttctgtcatgtgtgtgtgagcctgcaaccatgcctttgatagcctctctcacttcacagacagctaaatatggggattcagagttcagtaaactgttctaaaagggttacaagtgagagagacagacgtcaggccaattccagggggttgtagatgtgacacccgctggggaccgtggatgagacaggggtggtgggctgctcatgcaagctgcactgtggagaggatttctctgtggagggccatggctcaggaggaacttaaagcctgtcttagggccctgacacatttctgtcagagatcacaacatgtgaggaggcagggaggccgggaatgggatttctacatgaggctcagcctagggaagaggccagaacttggtgggtgggtgacaagggccggggctggagaacaaggtaggcacctggcattgtgagccgtggttctcagctgtggggtcagtaagctgtagaaatggacttgtgctattccagggacagtcagtgcagggttctaagcagggcactgtggccagattctcattttagagtgctgacagactttgggggggggatgcgttggaaggaagccagactggagcaagggggaccccagaggaaggttacagagtcacgtggtgaagaagggactaacagcctgaagggagactgcgatgacagagcagagagctctggggaagaagggtggtgggatggggctagctggggtcctcttggcaggcagaggtcttgggtacctggctttccatgtattggccagaccaaagctttcctggggacagtgtcactcctgtctccttgggtcacatgcactaagacaactcactagcaatgcctcctcttccaggaggagaaactccagagctgggtgtgtttgctgtggcacaaccagagatccaataccagtataggctcaccaggaatgaggtagaaagctctgtgtagctccccagactccagaggactctgtggtgtgactcttctggttttctctgcaaaggaaacacatagaatctgaagaccatagagggagagtggatacagagcccatgactctgtgatcacagagctgtgtttctagataacagtattttacctaataatcatgttgttagggacacagtacatttacagttaggtattctggtatttatctctgtccccactcagagtctcccctccctgaagctatgtgtcctggccacaggcattcctgctttcgaaggctcactgtgattgctagctgtctgtctgtctctcagcctccgagttcaagcatttcctcacaggattccttgcaggatcttgagtcctgctatgttatagcctcttctggataactgatcagagcttgaccttgaccccctttcctcagcctctcggttattgagatcacatgactaactttaatctaagaaccaccttcagttaaaaaaaaaaaaaaaagaccacagccagcctggtcttcagagtgagccagcctgatctacagagtgagttccatgacagccaggactgcacagagaaaccctgtctcgaaaaacaaaacgaaacaaaacaaaacaaaagaccacaaatagaggaagcacagaaggaataaagatagagcaagcccacggcgctcagtaggcaactgcttagcagcctgtcgcaggaagctctctctgtgcacatagggaaaagctcgctcttccatgtctctttctgtgtctccacgctgctgtggccctgtgctgtgctctgatgatgtgaggctctggctagcttcattcttcacccatctcctccttaatactattcagggtatggttctaccaggggtggtagtgtgggaagagatcgtgtgccaatggctctagataatttttttaaactctcattaaaacaaaaacaaatacctcattgccccagatcttctaactttttattgttcagtatagtctgtttatttaaattaatttccacaggtaatcttatcccatgtacgtaaaccccagacattttcccgatgtttgctttttttccatgcatattcaacaatgcaatgattctcttcgtgtgtgtgtgtgtgtgtgtgtgtgtgtgtgtgtgtgtgtgttgttttgtttcctgccaattgaatatcttttgtataagcaaggtaaggctgtgtctttcatttcataaccctaaggacagtttgaaggctcagaccgtgtcttttctcctaacaatggctgctgttggttggtccatcaactaagtctcccttactagcaatggctcgcgtggcgggccattgtgtgcctgacacttctcttgctgctgatggtagggctacgtctgtggacagtttttatctacaaaattaaacacaaaaaacattttgtggatataggtaaaaataactgaagctggattagatgttggttaaaaatacacactttagtgcccttctcttccccacctggaattgcaacacttgaagctgtttgttgagataactatagttctaaatggaaaatcccaggaaaccggaaacattgggttagtttgcaaagcacaggggaaagactggccacctctgtccaaaggttgacttctaatgacagacacaataaacaaattctttttttaaaatgacttgagcaagcattaacaggggcagctcagtgccatcgaggcctgcctggggagcggagcacactgctctttgaactctgctggggtttcctgggagctggcccctcctggctgttcatacttttcagggatatttcctgtaggggcctggggtaagtagcctgcttggtggagcctagcagatctactttgaaaagtcatccctgcctcgtgtgtgccttgctggctagagctaagaggttgtgtgccccctctaagcctgtgttcctctgctgtgaagtggagacaattccagtgcctttctaattgcattgccatggggtatacgtgagccatgaaagtagggtgctgggcacagggcagaggatctggtggatgcctgctcactgagaggagcctcgggttggctcccctctgcagatccttctttggagcccagccgtggaacatcagcatgaccttgcttcatgtgtttcctgaagcttggggttctgagctacccctgggtgccttgcaagctgtgttaaacacggtcccagctttgccctttcagtttgcacacaatagcagaaggcctaaccacgacaggggttagtaaaatttgcttattaaaatagtacggtgtccactttctcgtagaatgccactcctcagtgcttaaagagatttattttgttcactgttttgtaagtttcactctgtcatgggagggatggagggaggaggcagaggaacaatttgtagcatttttggacaagaatcacagagaagtgacgggaggtgtgtggagtgtaagatccagccccaaggatgccttgccaaagacctacttcttcagtcaggttccaccttccacagtgtcgccagctcacaacaccaattggggtcttaaatccagcagtagattcagcccaaactgtccaggctcgcctgctgaaaggcccctgggaagggcttcgcagacgcaccccagacggtcaggtccatcctcatgaatatctactgtgtttttctgtttggccacctgcacagtgaaagatggaattactctttagggcccggattactccttagggttttgcacttcagtttcctgcagtttcccagttactttgttggagttatgcttttaagatggggctggagtgatgcggagtacttgctgctctcgcagagtactggtgttgagtccctggcactcgtgtagggtggctcgcaaccacttgtatctctgactctcggaaatccaacaccctctgcaatagtggttaatagtctgtcttatataattgatatttctggtgaaaaaaaataggaggaagtagttctgtttcactgtgggagtctcagtggacaaaatttagagtgctagcaaatagtgcttgcagcataatatcaagtcctaaacttctgtatgaggtaatgataaactctctccttgtgcccctggctgaccaattaatataatacttgggtttcaagccagtaagtgactatgtgactttgaaactatcacatgatttttcatagggttcttcatctgtaaaatggggtggcgcctgttttcccctctgcctgtgtgaagatcacctgcgttagttagtgcagatcactgagttgtgatagaaacatttcatctaacggccgttcactgtttttccctctctactcaccgtccaggtgctcggtggacacgttccgctcattggtcctgcctcccttccctcactctgtaaaggatatttattctgtatttcttctttccacctgctgcttccctaatgacatcttccagtctgccaccccagtcggtccctccggtgctatggttgccgtgagtacacacagcacaggaatttgtccgttctccggcatggtgggagtggatagcccttcctgccagaattctgaaggcagttgccatgagcgtcttgcgtagggaaactttctgttctctttgacgctctttctcttgctggtccttttcatttattgcacagagagtggtaaagtggtgagctgaaaagtcagccctcgggttgaagccaatgtgggatttgaattcatgacccaatgccaggagcaagaatgtgactgaccacccagagctaaccctcctgcaatgtaggcatttgaaatacttgtataacgctgtgaccgcttgctctctgtgcttccttcccaccctgtcttttgctgcagcactccggcctcccgtccgtcccccactgcttactacagatgcttccttcttgctctccatctctcctgtgtgagttcctttttttgttcttgttccttcctgtcctttctagtttaaaaatagcttccagggtctttggctgcttggccacaactctgaccttccttctattcaaatgtgtctctccagagcatcttggatcctgttcacttgagatagtcgcaccccacgacccacgctgttaatctgtgcctattctcagctgacttgtggagctcgccgacccttgtactccgagatctagctgaaaattaagtctcctgtaccagatgcttaatcagtgacttgttcacattgtccctgacaaaccctgagctctcctcccctgctgactgcctgtggtgcagaaggggctgctgcacccactgagacattcatctttgtgcacagccatgactgtgataagttcaggcttagaaaccacctttcagatgccatgctatgcaggttccctgggggcaggggggcttcagctattctgcccccattgaaatatctcttggtgtgtgtgagggtcatgttgcctcaaatttctctccatggactgcctttaattgacattggaagactatgatctttacagaaacagctacgtagccagcgttgactgaggcaatccccacatgagtgtgcgccctaggataagtacctgacagactttgatgactggtggccaaggggctgacttcagcctctaccccaacctgtgcattgatgggctagcaagagggttgaagcggttctgctagaactcatgctgggcagaacatgatctcaaaggctgccattcctctggccctctagctccctgcatggttgaatccatgaaaaactgtaaacatcgttatgctagtgaagatcgagttcagattctcccatgctgttgtgtctgcctgccaggcttccagtctcacagactgatgaccaccccttcttaccctgtaagtcagctacgatgccatctttggactgctatttttccaacctcctcagattcattgtctctttgggatgggtgtggggggggggcagggtgttcttagcacttacaaaagctctgtcgcagctcttgtcaccctgataatttttgttccttgagccagggccttgctgtataagccaaggctggactcagagtccctgggtagcccaggctagttgtgagcttgtggttttccaacttcagcttcccagatgttgagattacatcatccttgtgctccatcgtctcgggcccttgagcgtgtggttggctttcctttaccctagtcacctgagtgcctggaggcttgagtcacatttcattaatcgttgtgttctcataacctggggcgtcgtctgagatgttacgtgtactcagtagcatctctttccatgtttgtttgagacggggccttttacttagcccaggttgtcttggaactaaaacatgtatatttaatgatgtcatttcttgtcattggttgtatggtcagtgtcagtttttgaaacaaaaggaaagcgttgttgaataagctgactggatttataacttcctatccagccaactctaggacaaggggagggaatactgcctttgctgtctttcaataccagcatcttatttctacactatatgatcttgtgaagtgatggtgaactttatagacagatgggctggcatggaattcagacttgacctagagataaaatggtttgagttaccagtcaggaatgtacctctgggaacttcatttctgctgagctccaaagtgatcctgctgagggtttttaatctatgttatatacctgatacctaacgctgtagtcttccaaagaggactatgaacccagtatggagctggtctggctttactctgttgaatgtttattcaaagggaccaggcactctttgtgtgccaaacgatacagggagtgcgtgcgatccaagcctcttgtgctgagatggtgaggtaggcttgctgtgtggctgtgttctgagaggtgctcctctcgtcgggactcagctgacaaaaggagtcaaatgaaaatcagctcagtgggtctcagagtgtttgcctagtatgtacgaggccctgggttcagtcccctgggctgtacaagccaagcatggtggcacataccaataatcccagaacttgagaggtggtagcagatcagaaattcaaggtcatctctcctcagtgacagggctttctggaagtttgtgcccagcttgggctagagacgtgtttgagacagaggaagagacttagaaaagagttacacattcagttcatttccccagtgagacgcaaactgctctgctttcttgccctgcatcctttcctccattctgctatctcacatccttaactctaagcttctatttcagcagcatgtaaagctgaacttgaagctgtctgcctgtctgtctgtctgtctgtctgtgtgtttaatgccatccatttctaggcactttcagaggtcagcagtcagaggcttttctgactgttcttaccctcccttcccgcttgcgtgccttttcctgcggtaggtatccaaggaaacatgtgcctgctttggaaaaaaaggcaacactaaagacatcttgcttttgaaggagtgctgcagctattctgaacaagaaaacaatgtccttcataatcttactgtgtgtatgtggggttggggtgggagtatttgtctgtaaccctggcctcactatgtaatcctgactggcttggacccctcagagatctgcctgcctctgcccccaagtgctggctaatggcatgtaccctccagtccccacagtgacagttcttcctactgctcctgtgtcccccgcccccatctctattcacccgcactgtctgacatagctgctgctgttgtgattttattccgctttgtgatatgcaaaccaaattttactttttgatttgagttgcttgtgacatttgttaagtttctgataccccaggaccctcttctgcaacctcaaagcttcccgactttgcgtctgtagcatttcaaggtgataatgcctgttgttggtttacgagcctcctttctggtcttttctttgagaaattcctggcctttatcagagccctggagcctgtggaggagctggaggctgatagcgctgtgtgggatgagggcacgtgacccagtgtgcagggcattcagcaggagtggaccgtgccttccttctgctctgcacagcactgtgggagctgggctcggggctgtgggaccagaagaccttgcgctcgctgtgctgcccagtggtagcctcttttgaaatgagttccgctggactggctgtctgcccataaagtccactttaaactttgaagacttggtggtagaaattatcacagtgatttcttgtagtgagcttaagataaagtgatgatattctggggatgatggcttaattaaaatattgctagaattcatagaacatatttcttttgaccattttaaatatggcacttacagaagttacccatggctggtattatatttaccttggacagtgtagttctccgaccttagtgtttaaaatgcaggttgtgaggtcttagactaattcagtgattatgaaaatagtgtttttaaattaggatagaatagaatagaaataccagaatggcacaattgggaaactttgtttttatggtcagaatatctgcaagtcattgtcctggcggccaccttaatctggagcattgccaggagagctggtctgctctacccgagggcagcttggtaccaggaacatggtatggagctaaggcctgcgagcttaaagctgatctggaactcttcagctaaagcagaccctaccagaacgtaaacctgcgtgtcagtctcatctcagtctcatctcagccaagagactccagagaatgggggggggggggggagcacgacgacgctgcagttccgactcttgaaggcctgtctgagctcagccctaaggttcccctgcagtcgagaagggacttttttgtgtgtgattaaaaccttttccaaaatggtctcaggggtggtggttctttctaagaagtgagatgtttcttagtgaccttggactcaagtcagacttaatagattttgctgggtttgtgagtgcagagcctttccttacggtgtcccttcacatctgaagaggccacggggtgggaggtgcgcacgagtgtgtgtgtgtgtgtgtgtgtgtgtgtgtgtgcttgcgcgtgtgtgtgtgtgctcgtgtgtgtgtgtgtgtgtgtgtgtgtgtatgtgtgtgtgcgtgcgtgtgtgtgtgtgtgtggggggggggggaatcggaagaggctgctgttaacctgcgatcacatcatccttcttccagaaaaatgtccttacagtccattccagggacagtacattacagctcaccagatggatgcatggatgtatgcatgtgtgtacttatgtatgtatgtacgtacgtatgtatgtttggctgggttctaaacacaggatacttacagcatggggaggggacaaagtcccccctacccaataataaagtttgtgagtttatggccttgtatttattctgacagttgtaaaaattcttttgagttgacccatttttcctttcttaattaaaaaaaaaaaagtctggcaggccagagtaagaactatgaaacacgtgactcagtgcttcagctccttctcctggaggcaaagtctttaaaattatgtcttaggcacgcttgagttttataaaacaattgcccacaaaagccaccaactatttgctcctgaagcttgtagatttcgatggtatttgtttccaggaaggaaatttaaagcacagcgtttgggagtcactgaacccgaactgtctgtggagcgcttgccctgtgagctagctgagttcgctcgccctcggcagtgacagcattgacagagagccaggcagcttttgcctcttcttcccctggatacgttcagccttgttggtaatcacacaggatttttaaagagagctaggttaaaagatctgcaagttcctttggagatagaaagcgccggaataccaaggacagcctgaacgggcaccaggcatttgaatggctgcccgtcaaaattgctcacttgtttgtttacttcagatccttcagactggagccgccatcgaggagcacgtgattctggaactttatcacagtagatttgaagaccaggcagaagcaagttccagtggccctttctgggcagttcccctggctccccttctgcatactcgatgctggagctgattgggcggcttctctgtcttacggtctcatctctgatgccagtgtctgaggaggcttcctttctcacacctccttctggctaaaccctacctacctcactcacactagtcctcttgctgctttccccataaagctgcgtccatttcctaaaagatagttaaatgtcctttctctgcacaccaagcaagctacactagggatattccatgtcatcttctaagccacactacatgcaatcatcagttttgtgttaaaaacggtcaagtattggcagtttccatatagttctgtctaaaattagctgtgttctgtataggacttgagataggtctctctgtgaatgtgctacattcaagacatatttagcaaaaattctttggcatctttttaaaaatagggtcattgttaagtaccattaaactatcttagtaggcctgtgcttagagaatggatgttttaaccatctaactatggatgtaatatttactttcactaagcttaattttattagttgtagtcacattttcccctaatttttcattatcttttaaaatcctgattcagtaaaatatcagctcagctatagctttcggttcggttacagagctgctgtgttgtccgctcagtaaccctgcatccccattggcaggcttcacatggggcttggactcagatctagccatctccacaactattcaacgcacacatctccgtcctggctcgagtgaccagagggggtagggtggccctggcgtctctgaagcctgagcaggcggcaggggcacccgtgtgagtcggtacagaaggctccttagtgtggtctgactttgtttttctcatgatatcatgttagctgctagtgatcattatttgcaaaccagttctgtagttttggcccgggcatgggcacagcagcctatcgtttgtggtctctgcctggtcattcacatgtgtttgtgtcccttgcttgctgccacactgagacacccgtggactaggcttctcttccattcatcagtgttgggagcacttctgccaaggctctcagtgcctcccgtctccagagatgtgaaatgacttacagggctaagtgctgttcttctccatctgttcctctccagctccagtttctccttcgctgtgttggtctctctttccagctctaaggccttgtacttgatagagaagatagacgccaagatagggttgagcagttctgctttcttgcattatcagtccaaatgaccccacctatcagctgtgggccacacccttccttattcttgctcttagaatagtggaagaaagcccttttgccggctttatgcttttcacagtgctcattatctgttaacattatgactattaatgttcatgattctgtgtctggggtgcacactactctaagcaagaccttccttcattgaattttaaaaagccttttaaatgagttaatttattctgtgtgtttgggcattgcttacatgtctgcctgtgcactatttgcgtgtgcctgggattggaggagccagaagaggatgttggatcccctggaacagaattccaggtggctgtgagccattgtctgggttctgagatttcaatcagggtcctggttaagagcactggctctggataatcactgtattaagttttttgtttgtttgtttgttttacttaaactttttttactccaaagaaagaacatgagaacaggttagcttttctgtatttatttatgcttataacatttgtactaacaaattttggcaatctatactaatgtgtttatagatacacataatgtattttggtcatgtacacacacacacacacacacacacacttaaaagctaaacactaggggctgtgaagatggctcaattcagtatacttcagtgagaaaccctgacccaatattacgtaatggagaaggtcaaggaagacacttgacatcaactgtgggctttcatgtgcacatgcacactgacttcatacttgtaaatatgcacacacacgcacacgcatgcacacatacaaatagataaggtggaaaataattgaggaagatacttgccattgacttcaatcttccacctccctacacacatgtacctgtgcataaacacacacacatacacacaccaacatgtatgtacacaaacaagcaaaaataaataagaaaatcttgatgctaatgcaagggtttctggaatagacacttcctcggctagaccaggagagtagcattctttattttattttagtttttggtttttcaagacagggtttctctgtatagtcctggctgtcctggaactcactttatagaccaggttggcctcgaactcagaaatccgcctgcctctgcctcccgagtgctgggattaaaggtgtgcgccaccacgcccagcttgagagtagcattcttgatgatttccatgccagctcttactataagcacaggtgtgtgtgtgtgtgtgtgtttgtgtgtgtgttcattcattcccgaaggagcagatttgagaagagtgggtttagaggttgactcatcgcaacaactggacatcctaggggcaggctgtggtcacatgtcccgttagggggctttctctgttaagggcaatccttccctaccttagagtccttttacccactttgcctcattttccctgagagccatcaccagtgccttcccttcttcatttgcttgctcactcttatggcttttcactttcctccattggtctccagattccagaggtcgtagggtccgttcttcccctcacccagcgctatagacgatggaaagatggaagatacgagtatctgttggatgaatgtgtgcaaggaaaagatgatggttaaattccacggaaagaatgagaaaagcatatgagactgtttagttttggaataagcacatttatctatgtcagaggcacatagcacagccctggtcacaattggcggcctactgggctgtgaatgaaaggcaaaatcacactcagtatattctacttttgaaggcagaaaaagagtatttttgaaacatttccatcaaaagaaatgaaacttttaaaacactggtgtttgaagggctcaccccttgggaaaatgactgcttaccacagattgaattcccccgttgcacaatttgaaagccacttctttttaacatctgttttgttcctcagccttattcacaccctgaacaacttcttcctagatttttaaaaaaagatacgcttccctgcttacctccgagctctgtatccagaaggcgtgggagtggctctgagctgcatagggcaagggtgctgagcagccctgcggagccctgggctcctggcctctgcatgtgatgtggcccatttgtgcttctcaggtcttttttggaaaaatgaattgataagtgttcctaagtgtctacagagggtctatcgagtcacacaagtagatttgaaaaatgctatgatctcctccattaagtctttgctaaaagcataggtctttcgtagatgagtggctcttctctgtgcctgttacccttgtgcatggttggctcctaaactttaaaaatacaaccttcttatttttgttctttcttttcctgttgttatttgcgtgggggcacaacagccatgatttccctggttgaacagaatctcagctttataaccttaaaagcaagggcaacttttgaatgtgaagggagggcctcccgccttgattagaaagacagagccgtgtgccgtttggtaatggggagtcacacagctctgttggttacataatggaatggtcactcagcgcagatactggaatccatcacccgggaccattgtgtccctcacagagacagtgccctctttgtgcgcagcacgtcagcagcttgtggttattagcttagctgttaacttaaatcgcattcctggaaaggaaaaggctgcagctttcttctctctctctctctctctctctctctctctctctctctctctctctctctctctctcggaggggaggatgcctatttgaaaatccaaacatataattactgctggccacatggccattacacttctttgacaagacaacttgtgttttgttaaatctagacagttgtaatttcccacagtcccatgatctctgtcatattaatttgatctaaatatttgagggggaaatgaaagggtttggggggtcaaacttggtcaaatacatttgacacctaaagaattaaaaccttaccttgaaatgttggtaacataggacagttatttcatagtttgccctacaatggtgctttggtttggatagagttctccagggcttggtcttaggttgctggtgtttggaggtgacatagaacctttaagatgtacaggtcattggtagagcctcccttagcgttaaggtctcaggattccccaggttcttatgtgagtgacccactgcaagagccatcctgtctctcagagtcactcctgcttcctgtttggaggtgattcttgccagtgtgttggcatctttcctccaaggtcctcactagagctgagctgatatggtcacctccaccaacctctgatgtccagaactgtgagctaaatacagatctcttccttacgaggttagcctgcctttgccattttgttatgataataaaaaactagctggggacctggcgagatggctcagagggtaagagcactgactgctcttctgaaggtcctgagttcaaatcccacaaccacatggtagctctcacaaccacccatgagatctgacatcctcttctggtgcgtctgaaggcagctacagtgtacttatgtataataataaataaatctttggaccggagtgagcagggaccaagcgagtagggccaaccagagcaagtggggatgaccagagtgagcagaggtcctaaaaaattcaattcccatcaaccacatgaaggctcacaaccatctgtacaactatagtgtacccacatacattaaataaataaataaataaataaataaaataaatcttaaaaaaaatctagccgatggatgcagatgctgtttttccctccccatcctcacgaggggaagtttgtataggattgaatttgtgcttcatttacagcatcagccttcatggagtgggtgggctcttggtgtctgccatgtgcactcgtgagtgtcaggagaggtcagcacaggagagcactgaccttgccagtatcattcctctaaatggagttgctgtgaggttctgatgcgagtgtggacagaggaagtctctgaaaaggccacacaaataaaagtagtaatatcatctctgggatttaccagtcagatgcaagcctgcgtgccgtctcatctgctccagtggggaacaattcaaagcaaatgtatacatctgctctgcgtgaaactgctgtcaagcgatgactagaaagaaaacaaattggcgccttgttctaggtgaagaagaaagaggggtggaggagagaggggggagtgcagaaagtctagaagttgagaaggagatttctcagcttnnnnnnnnnnnnnnnnnnnnnnnnnnnnnnnnnnnnnnnnnnnnnnnnnnnnnnnnnnnnnnnnnnnnnnnnnnnnnnnnnnnnnnnnnnnnnnnnnnnnnnnnnnnnnnnnnnnnnnnnnnnnnnnnnnnnnnnnnnnnnnnnnnnnnnnnnnnnnnnnnnnnnnnnnnnnnnnnnnnnnnncaacatttgggtatagtgggaggtaggtgtgcacatagcctgccatttacacccattagcacccacgatggcccttacactagagtgtggtccacagtttgaggtgctttgctcctgttacctcttgtcttctcacagccccctctcagttgtttacagttcaccctccctgcagactctacagtatagacccgtctgatggtgacacactcgtgtttgtattcagtgctcatccgggcatactcgccggcttatagcccaaacatgattggtttaagatcagagtcctcctggcccacattttagaaggagatgttttagtgaagtattgtttcagttatgaaaacttactacaaactctgagacctcacacagccttccaagtgtagaacctggctgggtaaaatggcacttaaagggttcggatgcaatcccgacttcctttttgtgtgacatcctttgtgtgtgtggatctgaaagctgtggtagtggacaccacacaagtacatctcttgcagtgtgcacattcacactcacgccttgtggctgctggtttgattgtgcgttcatttctttgacactcagaaaccaagccaatgcagagtcccactctctgttttcagagagcaagcccgtggattctcaggagaatttgtctttcccatcagctccatggcattgacagctgataggacagagggagcagtgtgaccccagcgaccaaaagtttgactcagcatctccatcttgacaggaaaggaattgtggagaaaaaaaatctcatgggcttagtaatttttagttatgatggtgaactgtagaactgactagtctcaggaaaatgctcggagcaatcatgtcagcaggtgtaccgcagctcttcattgctgtgaggagaatatgccagcttactttgtttatctatgagtttggggttatatttttgtatttttttcatatgtggagtctcgtgtgcttttcattattgcaaacatttatacaatatttatggcatggtacacccatcatgaccggtgacagagcctggaacaaagcagacaggacactgctcttttgtttacagatagcatgtgaggtgctatgctgtgatggtggagggatgctggggtgttgatttgtgcaaatattgcttgtttattagaatgagcgaggagccatccaggaggccatgtttggccctcacagcatggaaggagataatgcagaggtctgcagacgggaagggacctatgaaccttcagggtagccaagtggatagctgtggtggtgaagggcaaaggggtagttgggaatggccttgggaattctagtagaaggttggatcacttccaagtgtcatgggaagctagagggaggttgtaagcaagagaatgacatgacctgaagctaagaaggggtaagaggaatgagtcttctagccatgaagttataaagaaggaaaaagacttgtgtgctggctttgctgcggccgctcttgctgtaaccattctgatccctgtgcacattgagggcttagttgggatggaaaggctgctctgtacagttcagtgctctcctaagctccggcctgctctggaacacagattagggggactgctactccgatgagtaatctttattcttccgataagtggcggatccctgcaaaccaatagtctgatatggaaacagtgtggctgttctgagtaaactcatctgtcttcgtcttctggtggacggacacactcagtgctggacatcccttgggaggaactactgagatgtgggatagatctaggttctgtagagacttagactttattccactgcagaagatgtactttagaagtatcatcatggctacaggtcccaggttaaggagaggttggagcgggtgatgagagtaatgcggctattacatcctcagttaaggtgtggggtctgcattaagacaaggcactggggctaagggggtagcgtggaacagagggacataaggacagtctgagggactagtggtgggcccgtgggtttacgtgatagtactgtggctaagtcaacgtctgagtctggaccacttgaatttgaatctttgcctcaccacctagcatgtgatatggaacaagctatttggcttctgtgggcttcagtttcctaagtggcagagaggagataataggtgtatctgctatataaggtaagtatgagatatatgcacagtattctcaggatcttaattgttattgtccgtttttcttagaagcaagcagattgttgagtattctgcaagggccgaggaacaactagagtgccatttataacctattgttgttcttgagcagaagggtcaatgagttccaggaaagcatgcacagtgccagttctgtggtcaccacaggaagtcggttttaaaacatttccacagagtggacaaccagcaggaagagaaatgaaggcagaggccaactctgtaggctgactgaatgcctctcttcgcattgcaaaacctgctgggctccatgtcataagcactcaagaaaggtcactgtggttctctccaaagtgtctcgggccacggcatgagtgtcaggagcgtcttcacatacggcatagtcctttaatcccaagtccttggagttttatccggcagttagaaaagtcatagtggcaaggtgactgaaccaagaatcggtgaaaagaaaacaaagcgagagacaagccaggtgccttgtccgagcttgtctgtcgtggttggcttcttctctgtcccctccctgagacttatttgtgcttgtttccccactgtcacactgtgtttctcaagtggcaaccagaacaccaaagccactgctcacactgtggctttctttggagcacagggtcagaagtcctttgtcacccagaacctgaggtgacttttcttgaagctcctagcatttgggggctggaggtgggggagacaagaaaatctccaagtattcgctctttcttggtaaaattttaaaagttaaacggtttttaagtgtagaaaccaatctttgctttgacccattggtaggttccctagagctgctattgaagtgacagggcaggggactgctgttcatctgtgtctggccagggttctcatcgcttcagcactcagtgataggaggcactgtgctccctcgctgtccctgctttctgagtgtgcacatggcaatgaagcaggccgcatccctctgccatttttaacctgcttccataaaactcacagacgcagatagcttgaagaccgtctctgtgggattggggtcccgtaagcagtcagctgggagcccaggaatcactttcatcctactaattgcacaggagcccctccctctggtgatatctgggtatcttgtctgtctagttttttgttgtgtctgtgacttccagcaaccatgtaggagagactcaacaagtatttgttgaatgaattaattggcttaagtgcatttaggagcaaacaaaaccacaaattataagttagcccactgctgagatgcatagggaacgctagcaagttctcaatgacctaatcggcctagaattagaaataaaatctagtttcttgccattcttactgttacttgtaagtcttactaatgaacctcggggttctgtaatttcccatttacgatttctgtcattcacttagcatttctttaatgttaattaatgttaagcttcatccctttgagtcattaagtgaaagagtttgtgttcgcactatgatctgtactattagatttgtaaacagcagaaccccctccttttcttcatatactaaggtttctttagtatctcatttaagtcccctgcacaacggaggctatgttgatactgtcttctctaactgaccccaggagtgcatcacgagccctgggattggggagctcgtaatctgtcaggcagataagctttttctttacggctgacacctgccttttcacacgggtggttttgaccactcatacttagtgaacaaagtgtttgctgtttcgttttcttttcatttggagagatttggccctatgttcctcccagccatcagtatttttgatacgctaccttcatttcctctcttaagcatcagactttataaatctacctttttctctcttaagttcagactttataaatctatcttttttccctataccctattttcagtcataatattattttgtttttgattccctagtagtttgtgactctagagtagagttaaactagcatgtaggcaaatttattaacaggagacactcagtagaggccacaagctgtccctagggacttcagctgttgtagaattccgtagttccccatgcagcccgttgctctcctggcttctcttgcgccctttggtgaagctgtccatcctccttaggcacggtttagttatgtaagaccatgtagggatgagggagactgggtttcgcccaaagaaggcctttggcaccaaggcactattacttttaagtgttgtcgatatcagtctatgtaaggagttaaaaatgctggagatgacttgaaggcccagcttttagtaaaagtagtatggctagatgaaaaatgaaaaggattttagtacttcacatacggtattttatttgtggacagcgagtaataagtaggcttgcactttgccttgtgtcaattatctgatctatagtgttcttatgggaattatttgatgtgtgtgggttctagcctattgagttttggtagtcttaagtattcagatgtggagactgagtgtgcaatatattgtaaagcaataacatattgctttatgttactaggcagcacattaccatggtgaaaggaagctgcttttaaatcttaacactgctgcctgtcctggttggttgagtaactttggttacttctttgcttctcctcgagtgaagcagtgacagttcctgtcgtaacagctggctggaaggaatgggcatctggtccaaagtgatgctcagtcttggtgccagctcttctccttcctctgcatttaaagcccagtttcttagaagcgctttacagtgtcaggggaacagtacttgacaggagatgagaaagatgcagcatctctttccaagacatgtgctcaaggtgctcaaaaaaaattaaattaggttctgcattttattacccgatcttaagcttgaaagatccccgttttctctgtcagggggcctgtgctgtagggtatacttatgctaaacacagtactgagagagaggatttgccagagacctgtgccccccaactttgtgtgaactataaagctgcattttatatctgaattttaagtcacacatcaacttcatcatcatcatcatcatcatcattaatattatattggaaagaaaaagaaacgagctacctagtatcatttctgggactccaaaatctagggagtaaagacattgacagcttgatatggggctttgtgcttggtgtgtgtgtgtgtgtgtgtgtgtgtgtgtgtgtgtgtgtgtattcttatgcatgtgcacatatgtagcaggacattcatgagcctatgtgtgctagatggaggacagacatcgttctctttcacttgccatcttagcttttgtgactgtctctgattgagcatggagctcatggattccgttagattgtcccacggatcttactttctctaccttccagtgctaaggtaacagacatgtgctgaagtacccaccttttcatgtgggtagtagagaccctagcttacgtcctcactttttttttgatttacttatttttgttttatgtgtgtggatgttctgcctgcatgtatgtccgtgaacatgtctacagtacccatggaggtaaagtgctggatcccctggaactggagtagcccaggttttgagctgtcccatgatgctgtaatagaatctgggtcctcaggaagaacaatcaatgcttttaaccatggagccatctctccagcccccaaatggtgggaaatacttagtttggttaaaattgaactaatcccataggaaggtggggaagagagattttctgatatgatatacagaagaagaatcaagctaatgactgtaagtttgggaatgtcagtctattctgcctgcacccaagcttagggtctgtgaatggaaacgtagaactcctctcagggagataaaggcctaggggtgggggctgtctgagggcctacaggattgtgggaaagctcagggctgtggagaaggctttcatttcataactggcttcattcttaaagaatagtaggtcacacagaagctcactacaccccacccacccttacagataggtattgattggttacacaaatcagatgaattagacaggaagggcacccatgaacttgggaccccagcatctgctgaccttggtcattggaagctcttgatgagaggacaaggaaggggttgtgttttgggaagtttgctctggatgctgtcctctgtgggacagtgtgtgatgtttaagaagtgcgacagggcctatgctaattcaaacacttgagcccttggacttctcaaggtagcaggtggttttccttgtaagtagatgaccagaacatttggaactttaaggcttagctttagtttctatactaaattagcttcagatacagaagcagaaacagggtgcagtaatgacaggcatctcgagtccaatgtgtgtgtgtgtggggtggggtggggggtggtggcggtgctgaagcaggaggatcaccggagtgctaggagtttgaggccagttgagggtagcaagacctgctttcaaacaaaggaaaaatagagagaggaggcagggttgagagcattcccagcaaactctgaacccttagaagatgaccagaaatagtgatttgtgctagaaatgttaaagaggtagtctgttgtggaaaaaacaacttcctgttatttcagggagggttgctggactgtaggggcaatccaggaaaccttgctgagacaggatggagggggatggggcttctgtttgataacggctggctattggaccatggtacgactcccttcgaattttcctgaggatgaaggacacagaggcctggccatgggctccattctgacaggtgacttcatttgaggtcagcgcccaagggttgttttgatggagttcattgttgtgaacttgctcaagtctcctcctccacacttctcctttcttatcgtattctagactccagaggcaaattctctatcttctctgaggtcaaagaccatagtggcaacaaaatacttcacttgcagtggacacaaagagcaaagtgttcagctgccttccatagactcagagagggatcctccagcagtgggatgctgagaaaccagctctctaagagccctgttttgtcacagttgatatgcatgttcccagcatagctgaatttatactaacatgatgctactgactagagtcaagggaggggatgcatagttggcaagtggtacccgctggcttgggcagcatgtgctgctgctagttcttagtgtgtttgcatggttagatggaagatgtgggtatgtgtgcttctgtgtctatgtgcagtgcaatgaggatttcttctgggttctctgcccacaaatggcaccgtggaatctggcacacatgcaggtgcttcctcccagcttgtcatctttcctcttgaagcatctttatttttaacgtttggttgccatcttcagcaagtcactcctgttttacataacttactagaagagtaaatcttgtctggttgttagaacagagttccttctcgaacccctcttcccagcttttagatttctgtttactattctggttacgtgggtgcctgaatgtagacatgtgcacatgagcgcaggtgtccaaggagcccgaagacatcagtgccctgggtttagagttatagatagttgtgagccaccggatgtggatgctgggaacttaatgaggattttctgcaagagcagcaggtgctcttaaccaccaaaccatctcaccggcccacttacagatttttttaaatgccccttggatacccactggatgtcctcaagttagttcatggcagtataagaattctcagagagtggtcaagtcaagttgtacatttttatttttaattaactaattaaatctgtatgtatagtatatgtatattttgtatatgtgtgtgtgtgcgtgagtgtgtgtgtgtgtgcctatatgcatgcacgcatgtgtatgtggaggctagaggttgactcacgggtgttttcttcaatgtctcttcaccttatcttttgggagagtctctcactgaatttgagttcactcattggctggagtggctggctggcatgttccaaggatccacccattggcacccgacttcccaattccagggttccagatgtgttgtaccctgctttactatgggtgctgaggatgcagacttagactccggtcctcatgcttgctttgcaggcattttaaccaggaaccccgtccccagctcctcgagttgtgtgatttccaagcagaatccagtccttctctaactcacccttcccccatctctattttctttgatttggtgacactgtttgtgaacagtgagccatgccagaaatcaggtaagcatccaggattttttctttgcctttatcttttatttctgcatataattttattgttcactatcttcatggttttcttatttttttttttaacatctctctctaaccagctctttgccttgtaccagtgaaggccttcccccaggctcctctgcagtacagcagatcaccagttgtttttccagctgtaaagcacgcttcaccaatgctctcctcagcaccagttttcctgaccacagctagagtatgccctcaccatcagcttcctgcttcccagaggacctagcatctccaccagagggtacatcactgaagacctctgtagtcatgtcggccccagctgactgtctagccaggccattgttcccgttgtcccatcacctttacaaccatcttccccctcatgctttattctccgtagtgactttgtttctgctgggctctgtgcctgctgtgccctggccaacattgtgcagtcacagtgcgggcaccgcctactcaggaagccttatctggcacccccagcacaccagtccctcttggtgtttccaagatattctgccagtctctccacagttcactcacatggagttatgttggggctcagaaaatgatgcaccgcagtaggtactttggtgtgtggattattttgaactgaaggataggggtgtaaaagcaagatctttctgatcttttgacttctcttcccctttatctccttaaacagaaactaaaccacctcttacccaaagctgttggaagaactaaaatgttcctcaaaactcgctccacctttttgtgtaaggtttgcaataagtaaattatctgatttatgtcatctggcaatagctgttaggaccctcatcccaggaagggctgtgctctgccctcagaggagacagatgtggagttttgaatgggatgttcccaatattcttgggcatctgaatacttggtccctagttggtgctactggggtgagtttaggaggtgtgccttgctgggggaagtatgtcactgggtgtgggctttgaggtttcaagagctatgcactctttccagctctgtccttgtacttcaggtcgtaggttgagaggcaagctcaagttgctgctccggccatcatctatgtctgtctactatagtgtcgtgtcccccccccccccccccgcgccctccgtgacaatggtctcttcctcctctggannnnnnnnnnnnnnnnnnnnnnnnnnnnnnnnnnnnnnnnnnnnnnnnncttcctcctctggaacttcaggttgccctggccatggtgttttatcttagcagtagaaaggtagctaatacatggcactgtgcagggagagtcccggcaggctgagctgggtccacctcttgctctgtcgctgagagcagatcatgctccctttgcccacttcagtctcgccgtggctccatcctgcactgagcagaggcacgggcatagtgttttccctgagccgtcttttctcaagactcacgggtcatggaaaaccacaagttatcatttgctgtaggtttcacttgttaacctgtcttcagttgtggggatgtaaactgtgaccttgtcatgggtgaaaaacaatagcttaccttctgcttctgtgttctcatgacttcctttcctgactcctctgttgtacctgacggcctggatgtataaactgtaaggctttgctggcttgtggtactgtgaattaacatgtgagtcagtaattagatgaacaggtggaagaggcatctattcctgccctactcactgcatgctgctagcatagggctgatgacctcattaagaagaatataggacacactaccagcatggaaccaatgtggaattgccatataatccgagcaaccccgctacaggacacatatgcagaggaagtgcagtcatttaacctgagctttcatgttcctgcaacactatttacattagacaaagtgtgggattaatggatgaatgggctgtcccagtgtggtgtatatatgcacagtggaacattgttcatccttcaaaggaccctgttacttgcagtaacagagacagaactggagacactaagttaaaggaaataagccagacacattctcactccattgtgtctgtttaaaaagttgatcatgtcaaagagaatagaggtttctagaagttagaaaaggaagagggaaggtgactggtaagaaaacattattaggaccatggacaatgatgttagttgtgcatttcaaaacagccacactcgtggggatgataatatttgctgtgatagaaatgctaattaccctgatcagttcacttcacgttataaacccgtcttgacttaccctattcataaataagtacacacgtgtgtatgcatgaatttgtatctattagactcatatttacatttaaaataaggagtagagttttttagttctatgggtaggtcccaaataccatgtgagacatttctgtatgttcccaaattatttggttattattgtttatctgcaattagatttttgttcagcatcctttaactggcccggttaacctcttaaaagagtgtgtccatacctaagcagatagctactgctgagcttgtggtcctgggcccagagtctttgtgagctttggcaattaggaacttgtacacatagcttagttacttgggcagaactgtagatatttatgccacgggcggtgagcatgctctcttagacaaagctgagttctggtagctctaaaagagttgaccaaaaaacacagccatgtagcatttttgtggccttggtatcacggtcttgtcagcaaagtcatgggttctaattaaacccagcttgagctctttcctgttagcgtgctaaccctcagggcaggctcaggcctcctgtctggctttccaagtctgatttactgaatactgtctgccaagggctccaccctttaaaaaaaaacttcaattagaagttattcagataatacaaacaagaataggctctgaagttccttaaaaggattatgggcctatgaactctttcgctgcaaaaaataaaactttttaacattttagtttagccagtctggcgtatggtatttaagtttttttcacttatttatttgtttgttttgtgtgtgtgtaggggtgtgtgtgtgtgtgtgtgtgtgtgtgtgtgtgtaccgtgcatgtgcctgtggaggttagaagacagcatctaacctcagtcggtccggtctctccttccaccacgtgggtctgtgggattggttttaggtggtcagtcttgattgtaaacacctatactcactgacctatcttgttagcccagtggatatggttttacattttacttctgtaaaacttcacttcaaaataattccagcagtcagcagataactctaagtttttgcttgtttgtttgtttgcttgttttgtgaaaatatactgtttggatattgctcggttaaaactcactaaaaacctagcaaaacaaacaagcaaacaaaaatctggtctgctttatgacagcaagcagcctttagttattcactgagaatatagcagctccgtaggaaacatgaagccaatgtgctgaccccgaccttcttggttgaggtttgtgagaatgattgcagccgacggcaccattctggatttcactttctgatactgctgttggctgactgcattcacaaataatcctctccatttgagcactgagcacattttagtaagggttctctcaagtcacccgggcttcttcctgatgtacacagaggagcaggaatcagtcaagaagtatcctgcatgcagagtggaagaaagagactggccggagcagccatcccattccccagggagtgccctggcagcctgccagatccgcttgctctccctctggaagggaaaggcacccagggggtcaagtcctccaacagcacttttctctgtgtttgagttcttggccacatcaatatcagtgaaaacttagttctttttaagtcagcattactttcagaagaaaggtctagttttcgagtggagtttgcacttcaaagtaaggtgagactcatcccattacagaactgcccagtaagggagccctgacatatcacaaagtaaggaagtttgatctaaaattagagccgaccattcctaccaatggagaagccatgccttatgccggtaacacttggcattaaatattttttaatgacttgtatattattgtgtaggcagataattatcttgacagtcttttgaagtacaaagcaaaaactacaaaacatccttgtttttagtattacattaagaaagagatcaaagagatacaggtatttttagataaatgttttattgtatttaaattttaatttttatattttacttatttacttgtttgcttattgaaaaagagtctcactttgtatccaacactggtctggaatttacagtgtagctcagtcctttgtcatcagcctgtggatagctgggcatagtataggtgtgagccattaggcccggctaattagcattatattttatattgtcttcgcttaggtttttcttgctaagtataaagtggtaaacatgaagtatgttttcagtgcattgcagttcattgctagattttgtaagatgctcatagaataaaaggaaacggccctggaaaggctgcatgtcatacctgcttgctagagtttaacatcatgtgtggacacactgaaggcaaagaaagtcagcagtaaagaaatgtctgtagtctctgaaggtaccacagcaccgtctcttaaaacaaaacaaccgagtgtttacagtacccactcgaagcggtgcagcgcatagtgtttacaaatataattagagttcgagaccacagtctttcactctttgtttctgctttagttggaagttctggggacagatggacactgtggctccgcttgttgaaaagccagcacagagagaggagagcacctagaccgtgcgcagagccaacagtcctaagagccctacagaaaagctcctgtttttcctgcctcagacctatgtccttggaaaattattataatttattataatttttacatttttatttatgtgtatgtatttgtgtgtgtgatgtacacatgtgtgtcacatgtgtgtttatgcctatggaggctagagcctgagttccaggcagttgtgagctgcgagctgcctgacatgggttctgggaactgaaattgagtcttcagggagagcagaaagcatgaactgctaaacaatctttccagccacctccttagaaaattaaaaaattaagtaagaaacaaagccatgcacctcatacactgtggtcctcgcatcagttcctatcagcagctagacatggtgacactaagctattctaacctaaaagtggatgccaccatgtgggtctttctgggttaattttcttcttgcagtttaacttctgacagggccagaactcagtagtcacaactgtcattattggagattcatatgctgtcactctgatttctgtatgtatatatttcaatttaggactttaggcagtcagtattgagtaattcaatttatagtgagatgaattgcctggtagttttttgcaccaatgagaatctatgcagcattgagactaattatttgctttggaaacagatttattgcagagctcttcttggtaggtcagtttccttagcatccatgaaggagttcaacttggaaaaccacatctgcatgtaatttgcagggtgcagatttactcagaatgcaaggcacacccttatttttctgcagtttgattctctcccctcagccttgattttcaagcctttcccattttatcaccaatctttccacgttgtggtttacgtgtgttaatgtatagtgatatcgactgataactctaggtttgctttcctgtgctagctttctcagacgtacttattctccggtgtttgcagatttcccgagagcagggctgtgtacccgccacactttccgttgctccctgggataagcctcaggctttgcagcgcaggtggttctcgcccagatcccttggttgctggaggtatgaaagtagactcatcgctgtctgtgcactgacggctgtcagatcatagggaaccatggagaacagacttcttccattgctaattttttcaggctgtgaccataataccatctggctcacgtaaaccctatgctgtgtgtgtataatatatatgaatatgtgtgtatgtatatgttgtatatgtaaatgtgtatatgtgggtgtgggtgtgtgtgtataaatttggaacaatcatatttccagaactattatggatcgactcttctggcataccatggtaggcaccgtttttaaaaatgagattgaaaacatacctttaacagtacaaagaacatcagatagtggacaatttgctaaactccattcggtgacagacaacgtctttgataaagtattgccatcacccttgctgtcaccagtgatgtaaggagaagccattgtattgctgcaaagcaagaatctttctttcttcagaaagaatgggacgctacctccacacacttgctacacggcctcccttctgccacactgagttcacagaagcccacactgccttccaggactttcagctgcatgagagaagactgaaatgctgaccatttcagtgttttcagttttacatcagggagtgatgccatctgatgctaataatgaatctgtcccataggttgaaggggaccagctgcctccaggacacacagtcagtcagtacgagacctgcaagatcaggaccatcaaagctggtacgctggagaagcttgtggagaacctgctgacggcttttggggacaatgactttacctacatcagcatctttttgtcgacatacagaggctttgcctcgactaaggaagtgctggagctgctgctggacaggtacgatctaagggcggatgtcgaggagaacctaagggtgtggctctgaatcaagggcacttgggagtctgggaaggaggaagaaggagagatgaactggaaaagccaacctttggaatgagtggcatacagaatgtcaactctgtggtctatttctagggtaaagaaatccctcttagaacgttcgtaaaggctggatatggtggcacatgcttctaatcttggtattggagaagctgagccagcttggacctcatagcagtgctttgtctcagaagcaaaagcaaaaacaaagaaaaactaagcaataacctgtaaaaaaaaatgaacaaaagaattaaaagtaggttttataaacatagattcaactatttataaatttcaatatctgtttgctactcttaatttcacatttgatacagattaatttttaatttctttacaagtactcatccagctaggactctccttgttctggggactgaatgtgctcacacatatgaagtatggagctccgttctagatctgtaggatccagatgagtggaggctctggcagtggcagtcggggctgtcaacaatcactgcggagtcagtgcttatggccgtgtgcctgagtgatgtctgtgctcctcagcagcgtatgctgtgactcatgtaggacagtctttgtttcccctttacctttgttttatttataggaaaacttaggcactttgtaaacatactgttatattgacttagtcctgggacaaagaaaactgtcagccaaacaattgttttagaatcctgagactctcactcaggtccttgtggtctgaggtttcctgcctaaggaaggaagtgggatccagtgcttttgttaggcttattttgcccgtgcgtgtgtgtgtgtgtgtgtgtgtgtgtttatttaattttaaaggaatacacaatcatgttgaaaatgttaaaaattcctttatgatggcaagtatgaaaagaaatactaaagttttctcaaattgctgtcttactcaaggaacactttaggttttaaaatataaatttcatatatacatgaaaaagctttgtatatttacattcttaatatacagtgcaccgtatatattgtctttatagacttatttgtcagaagagtttattaagtacgttgtaagacagccccaggctcggcagtagtgacagccctgcctgcctctatagattcacagcgcatacatgacacaatgagatcagtcagagtgaccgagtgacctattttatttgtacacactgatccaccttggagatatgtgggctcattcagtgactcggcatttgtaaaaggctcatgacagtggctgccatatttaaagtacaggaaatgtccgttgttagttccaaataagcacatgtgggtagggtttctagcttctcttctagtgcctttctagtacttacggagttgataatttcatgggcaaagaattaagcactttttagtttttcaaattgttttgagaaatctgtgagaacagaaccaaccacaagggtcgtctttatacataggcaagctttctgagattcctaaagtgtaatttcacggaagagtaactacaccaggatataggaatttaggagcctgccatctgcgcctccagaaggttccaccagccatactgctgttctgagcactccctaccacagccccccacccccacccccagttcccgatgttctgtctcctcccctgagctgtctttacctgatctgtccattgaaaaatggttccgtgactcgaacttctcatgtttatgagtagtgtttggtgtttcagaagccacaccattagttgggtgtgaactcctcccatcctatactcttttcctttgaactactttaatctaattattagtcgtcaaattataattctttgtatattaaagaaatttgattttttgcttataattatattgggaatatttttcctaatttgttcttagattttaaagtctgttccttaagaattggtatttaactattttatgaaatatttctgtcttcagaaaggctttgaataaagacctttctattccaggttaaggctattgacaagagtagtgtttgtcagctttctgtccccgtgacacagacctgacagaatcaacttatgccaggagagggttgatttgggacccacagtgttggaggtttcagcctgtgatagattggccacaggtcactgtacgatggtgggagtgtactgtggagcgaagctgcttgcctctgagtacggagtgaagagaaggaggctgagcctctcctctctcctcctgaggggactgaggacggccaagtggaatgccatgtaaaggccccaccacctgcgctaaccccaccctgggcatcgggttttaacacagagacactttgggggcacaagctcctaaacactggatctgtgtttttatgggtgcacacgcagagaaattattggctcagtgtttatatttagggtcactcataaagcatatattctttatggcacactgatctgcccacagtgtcctgtgctatggcgtaaagatgtgtcattttctgcatgacagtacttgacaaaatattaagcctggaatagtaagtttggtgggtctttttttttttttaaatatcacagttcttatgtaatagttcatttgtgcaagtagaaattggagaattaatgaaatttctcttttcagtacttcatagctgtaaaaaagatggagcctggtaattgttggcagtcagtatttggaaatgaaattctcttacaagttccctttgaatcagtgacctcttctccacaggaggtaacttcactgataatagcccacagatgtccacagtgtgtaaagggtgcacggaagctccagctgcctgtcttaaagactggacacacacacaccaggaaatagagtgtttagtctatgactttttatttggtgatttttaaaaacatctattctttgttctatggatagaatcattgggatttaaaaaaaaacactaagttgataacaatgattatatagtatatctaatatgaatttagattgcattggattcaaactatcatttgaagtacagctgaatgaagagttaagatttagtctgtgccatgtgagtaggcttaaagctggctttgagtgtgatctcagagttcaatccgttgcttgtttcttcaatgaggggattaagggcggatacctgtgtaatgtaacccgcagcaagcactctgcaagtcttcacatagacgggactcagataggaacgatttagtctctgccctgaggtagttcaaagatggattctgcttgagctggtggcgcctcagctcggtggcccttcacttggagctcttccccatgacgctagcctcttaatttcatattcctttcccttaggggaacccctcagattgcaaaggccagctccattagacttagacccactcctcaggacattttcctgcaaaagataaggctggcttgcaagtgctaagtcaccatacaaggtgatagagggttctaatatgtgctggtggaggagttcagagaaacaaatcccatttagtttgctttctctgcagaaatgtaatcttgtctctgtgtgtgccaacctcaacaggaatatttctttcccacctcatttcttactcacgctgaaatcttgtggccccgattcagtctccaccgaaatccaactgtagagtctgtgaaatgctgtgttcccaaattggttgttaggatttttatgcctgtaataaagaggaagcaatttattgtgcagactcacctgttcagaagataaccattggaaataccattttcacaccgttaggttgttaggcttgtttgtgagcctcagacagaatctttcaggtatttcttttggtgtcttcagtggcgtgggaagaaggttgcgagccaatcgcagtatgtgctaaccctgtaatgagcagacacgaatagattcctgcagatgctgcagtgcccctttcccaccggagtctggcttgtgtgaagtcaagctttgatttcccttaagacttccagttgtggctttccctgtatggaactgtttactttctgagatttctttttaatctgttcatagttttgttttttcttctccctagtatgggtctgtgggattgacaagtaggcagtgttgtgaagtcatagctaattccatgtcgactttctcctttgcttatcctttattggggtgatcagtaactcacaagctcctgtttgcagtgacgtttgccatggcccagacttaggttttctctgcttccttttaactgaagaggaagttatttaattgggggctgactgtgttggactttgagattttattttctctaatgtcgagcatacatttcactcagagaagtctgtgaaagacttcgtcatttaaagaagcaggggtggggggtggggggggggagtagatagcactgaacatgtccaacctcagatgttggcagagcccccttcagcaagtggtcctcagtgagagctgagaacgacccacagaggtgcagaccctgctgttttccaacagtctcgccttctctgataactaagttagcaaatgctaacagggagagccaggtctccagaaacctcgggcaagccattcccaggctgcaggtcagagtgcaaagcattaagttctcctgcattgcaagtgaattccctcagaggactcttgggaagcttaaaggccgaggccacctatgaactgatataagatgttaggtaactctgtctgtgtcacagagacaaggcgaatcggtaggtctttgaatgaatttccttcccgtatcagcttgccatgttttcacaaactttgtctcacaccatttgtttattacaactctgtgctcacaaatggctcaaaaaacatacagtgggcaagcagcagaggggggatcaaagctcaaagctaccctgtgtgattcagaccctctttcccagtgtgcctggcacctcccatgctaactcataaagagagggcgactggggaagccttcttagtcatcttcctggctgcttcctcatttcattttccctggaaatgatatttcacaaacttgggaaatccactacagcagtactctcggttgccagctcaagttacttatcagctgtttaatgcaaagtgcctacgcacaaggcactgtgtgaaaatggcgccgagcctgccatgggtcccaccgtcttaaatatgtaatgtgtgctggtagacaggaacactcgtcaagacaacttacacaaagatacatataattaaaactgctgcgaccctcatgcccataagtccaacactcgggaagaggaggcaggagaatcactgtgagtatgaggttggcctaggttacagagtgggaccccatctcaacctcatcttacgaagatgttttaaatttacttggggggtgtttccttaggccaaaaatgtttcctgcttttggagttttaagatgttttatggaaaaagcaacttctttttctttcagtcatgagacttgtgtgttaggcaggtacaggggttgtgtggagcataggaattaaaaagagatttatttccagtttgtactctgcagtacttataagtatcactcagaatctatgtgatagaggcttagattctagtgaggtacaggggtgggaggggggatacccatgagacatagtgacaggcctccagatcatttgggacatgccttcacagaggacagggagcctcagttcctcccacttcgctctttctcttccaagctatgaagtaagcaggtttgctcttctatgctgcccactgtgatgtgctgccctggctcagacaggcaaaaacaacagggctaaccaggcatggaccaaaattgaattttattctctttgtaaattgattagctcaggtatttgttccagtgagagaaagctgaccaaccggctggctaatacacattccttcctggtttttaatcctttcagagtctggttctgtagacatgcaacagtaatataaaataacatgttggttgtaaggtcctgtgttttgttccttagccacacaatggtactgtgtaaggtaacactttggttgtagggtccttttttgctttgacttgctagtgaagtggaaatttataactggagaatatgactggcattcctttctctgtagtgtttgtgatgatctgaaattcccacatttactttgcatgtttttggatggccccacctctgagaggagtgatgcttgtggcaggagtgggggacgggtgttaggaacactgcctaacaaacatacgtttttcttgtctgttggagtgtactggaagatatcgctgtggatgccactcagattgtgagcatatcttctgggaggatctaacctgcctgctgaatgtaatgtcccatctagacagtaagggctaagatacatactcagtgaaaaagaaaaacctggctgggcggtggtggcacatgcctttagtcccagcactcgggacgcagaggcaggtggatttctgagttcgagaacagcctggtctacaaagtgagttccaggacagccagggctacacagagaaaccctgtctcgaagtccccccacccccaaccccctaaaaaagaaaaacctgtgcccttggcagcttggtagtagtgaattttgtaaaaagcacatcatacaaatccattctgttttcaaacgcctccttagaagcagctggctaagaatgtgtgaaacgcatgcagtatatcccagatgacttcacctcacttaaaaataaccaagttttcatttagtcctgaagttaaactatacacttaacttgtagtcttaggttcacgctagcgtgtgtcacccagaaagacaggtgatcctttgctgtgtgttccttctggaggcggcaaggtggctagtaccctttctctgttcttccaggtccagggaaagatgcgctcagcgggaaaagctgtagggagcaggtactggagtggctcaggtgtaaccttcttagtgccagtcctggctttcctaaccttctgcttgtcctaagagtacggaagttcaactctcatccctgatgtcagaagcttttcaaaatgaaggtgttggttttggtgactgttcagccgagctcccacaggaccaagcagaaagagggcgactcaagtgctccttcctctgatgcaggaagcctgggagatttaatggcctgcaggcttctgggtgctcacgttgctgattcagtgcaaaacctttcaggaaatctcaacatcgctttgtttctttgtttcttgtgcagcttaaaatacagacatcctggatatcctgatagggatggcagtttcttagtaaatgatggaaatttcatttttaactttttttaaaatagtagataagtttaaatatctaggtctgggttttgataactcccttggcaaagttaaagcctttgggtgtgttttgtcttaggaagaaaaggacaagttgaagtgaggttggccctgtgactgtgagagagatgaggctattgactgtgtaggtaaagaagaccaccggaaactgtgggccacaaaatgtctgttgcataaaagagtttaaaaagttgtaggtccatcttttttacgaagtgttcatttcttgctctttcgtgttttctcggattgagaactacttagctcacagaactatacaagataaacctttgtaataatttgcacatccatctgtggcaggcagagaggtggaggaaggaggccgtgagtccttgtgaaaggcagtgaagagtttcttagagcacgtagaaaggaacgtggtccagccgacagcttgcttttcagttccccgaggccggtgtcagaccaacgtaccaattaaacagtcaggttggaagctactgaatcggtggcagttcattgtagcagcgatagctaagaaacaaggacatcttcttagggagattgtcccctaaaacctcatgtccctggactcaggggtgccaagggtccgatgtgtaccctctgcctttgtttttagggctgtgtgccccgatcgtctgtggcctcacagcacagagatcactgcgagaagcctgagcctccgcagacaggcgctgttagtgttttctcctgtaactgtgccagttcccttggcttaaccagaaagctttaatctggtgccgttttagaattacctctcaccataatcacacgagggaaactggaaataagttctgtccctgctccctggctactttgatttggttattcaattgatttttttttttttaaccaagtggacctgcatcccacgcagctgaactgtgggaacacaggagacagcaaagtcctgattcgtgggatggtagtgaagctctgctaacctagacactgaagggatactgtcaaaggcctggcctcacgttataacctgaagtagggtttgtaagacctaagtgatgccttttttctttccttccccacttagcaacagcggcagggcgtgcaagatacaggatatgtttaccttttttttttttttttaaacctgagaagaatattgagttactttgaaagattcttttaaaagtatgtatatatttggaagttagaaaactgacaagaacttgaaaaaccatgtggatattctgagtggaaactggaaagtttgaaatttaactcatagtctaaagcagtagttttggaccatttttctagcagttgattaaaaaaaacgtagatcccaaaccccttttagaacctgctcagaatcctcagggatggcctggtgggtcagaacacacataagcgaagggcctaagtgtgagccccaaacatccacctaaaacatcagagtggccaccccacctataaccccagtgctatgggagaggcaggagaattgctggtgccggtgccagcctctctccagattcactgagaatccctggctcagagagtgctatagaatgactgcccaccctccacggcccctcattctttctggcctctgcatatatgcagaagtgtatgcactgcatgtatacacctcactcatatttacacatatactcgcccccacaagagtctacttgctaacatcagaatctttctttagaaaaaaattgttgataataacaaacttacttaaggaccctggcttctgtttctctaagcagaggattcctagaatatgtcctctgccccctgcccctgccccgtgacttatcctttccccttcagtaaccaacttcacagtgggaactggactttgccaagatagactaagtgaccgtgacccaggcctttgtcggacctgggaggagggagtgccttctgtggagggcattattcagggtgcgtccaaacaactctgtctggtctttgggaagcagtgcaaagccttcctaggcgtcctgtgaagttccaggcaactgttggctgctgcaggcctggccttctcccaagtgaaggttctggatggttctctggtgccttacaacttgagttcttgtgggtcagtgaaagcatgcccaagtgttctgaagctgggattcattcagagactccccgagggctttaagtcagcagcttcctgtgtggtctcttccttcacttgccccttctgtctgtcattcgctgttcccaccaagtatcccctccttcctctgccctccctgggctttcctttgttcctagcaggagaaggtaagccaatccgggattgtgttgactgtctactgcaccaggcccagggctggaggaggaggcaatgtcgccatgatgtgccaggccatcctgacctgcatgtttgccccaggcctcacctgctgtcggctctgctcttcactctctgcctatgttcaggggtgtgtgtgtgtgtgtgtggtgtggtgtagtgtatatgcggtgtattggcaagcaagcgtgtgttatggcaggcagaggaggatgttaggtgtccttctccatctgcctcattcctgtgagacagtgtcattggctgaacctggaggtagctccggtaatcaatctttctgtctccatcctctgctggagttttaattctattcctccatgcccagctttttaccatagctaccagggatttgaactgaggtcaccatgcccacttaggaagtacttgtactcctgagccatttccttagccccagtgatttattcttaatgtctagaatagtaaggacctgggcacagtccttagtaaaccatcctcatccaatgatgactaaagcagtccaagaatgagttcatggatgagtggacagggtcctgacatgataaaatgaacatgcagatagggccttctaacatgtgtgggagggcagtgacttagtgctgggcccagggcctgcctgccaaggttcaagtccctcttccgcctgccagtgatgtcgtccaggctttcttacacaggctttctgggtcacacttcacctctctgtgaagctggacgagtgatagcaccctgtggggttattatgggaatcgagtgaaacaatccaccaaagcagtgggcacccttcctgccatataacaagtgacctgttattaccattggctcatttgccagcatcaagcagggctcacaaagtcctttatggtgaccgcatcctggtctgcttctactgagacttcgctgttggggcacagatgtgaggtggttctctctgtagagagatggtgtctgtggacaacttaggaccccttgcttcagatacatgttaaaagctatgctcagatgggtttcaaacaaacttcttgaaagtggctcttccagatttaaacattatgttttttctttctcttattcaagtagttttaataattgcttacagctatactatacaaggcatttgtaagcctttctttctgcctgatgacaacatgagaaacccatgtcaaaagtcatctggcaatgtggatttcgatttaagttttataaagaagggcatttgctccttggtatgcctaagggagttgagctttgatctccagccctgaggaggcttggtggaaattggagatgacattgttgacgggttcatctgtagcttttctgttgccactaattaagcacacacacatgcacgtgttctgtttacccccttggaggagaggaagtgaacttgactttgatttttgatgggaagctgtgagcgggttcagggatacatcaaaggggccttcctcgtctggtaaaaccaactctgacatgaacattaaagagctctccattccaaagctagatgcgttttgttttccccatagaacatgacttctccttaatgataagacagggcaagagcggacagtcacccctgactagtgcattcaggtctagaagggtttccccccttcttcttctttataacagcacatacatacctttgtggtttcatactgctagtacctccaggatatctttttttttttaattcttaaaacctttttcatgttaattttggatattttgaataactacagccaaagctcaaaataaacttttatgctcctaagccagtggctctcaatctgtgggtcacagcccctttgtcaaacctttatctcgaagatatttacatttcaattcataacagtagcataacagcaatgaaagcgatcttctgtcagggagtccccacgacatgatgagcgagctgtattaaagggtcacagcgttaggaaggttgagaaccactgtcctaagcccttaaaggacaggttaggaccctgtgtgcgtggggaggggcaggtggtgctttgaaccgcgcatgagagcggtcagttggcatgtctgctgtggcctcactgggcacaagcattgtcgtaagcgtccaagagccgtgagcacagagtcaaaagtaccactcacctagaatttatgctctgctcggtacccagcccggcaaagctgaccttatatcgtgttaggagatgttgaaagctgtggagagtaaggtggtaaaggggtggtgtcagagtcggggtgcgttttaaacaggatgtgtagggaaggcctacaccgataggcagcacttcagcaaagatctgagggacccaaagaacctgccatcggaagcagcagaagcaagagacagctgtgaggtgggggtcgggaaagtgggggaatggttgacaggttggcgaggcaggagtgagtgagggaaacgtggaagttatggaccgagcgcagtgagcagatttcatggtctgtgggaggtgagactgggcttttctcagactggaatcatgggaggggcctgaggggagaagggctaggtcctcaacagaactgtgatgggtgggtagacacccatagatcagattagttaagtggcctttgacttgctttaccctgaagatggccacctttagaggcagagtagaaagagaagtgctaagaagtgtttggactcgggtatgtcgtaaaggcagagctggaggttttctgcatgggtcgatggagcaagatttgagcagctggaccttgtgcccttccaagccttgcttgatgattgacagctcctggaggcctctgagttatttccaaaccgtcaccttgatcccagttgtgaactgtggacagacactggcagtggagagaaggagtagttacatgatcttagccattgttaatgggaacaggctaatcaacgcacaggaatgcgcagtctttctcggcaccaacgggacagtgcactgtggcatcacattctgtgggaggagctgaaataggtgttggtgccacccaacctctacttcagctccaaaaagaaccaaaaaaaagagcaggagagcaggagaaattatagacaaaaggaaaaaagaaaaaggaagatctggaagcttccagtagaaacatctgaaagaaagctatcagtaaaatgtgtattttttccttgaaggtgcccctggattacccttgtctatttatatttctcacagttccagcaggaagataaaagacatttccggagagaagctaacagacaaattaacataacaaaacaaagattaagagccctgtttagtaactgagagctttagggagaaatggagaagcttggtggcttgcaaatggcctccctttcctgcaccctccccagactcccctgcaaaccacagaatccactgtgaggcaacatgaggacacagttcactgtgatggtggcccaaggaaagagccaaaagaatcccactttgtttatttactgggcgcttcatttcccactcctgcctggctcgtgtggggtggaggaaatcttaatctgactgagctcctgtgtcaggaagagcagagggcggcccggaaagctgtcacggagcaggtgctgcccagggtgaagggggcaggaggtctgcaaccatgggaaagaccatgaggccaagagaccagtaaggctgatgaggtagagagaggagcagtgtgtgtgtgtgtgtgtgtgtgtggaacttgtcggcatggggtgattgagacaccagatgagctgacagtcagttaaagcatgcttttattttgtaaagaatttgtaaatcttgagaacaaggagccatagggtactagagcttttaatcccattatacaagacaaagtgtactctttaaaaatgtaaacccaccaaatataatgttctagtttcaaaactcttgggacgacaaacagcttttcaaactccagggacttggaattctttnnnnnnnnnnnnnnnnnnnnagttaatggaatgttccttagggattgagtgtcagttactaaatgcatattctcttaggttgcttgcagagctggggatggagccagggcattgggcatgctaggcaaagcactctaccacggagccacctctccagcccctagatacacactctctgcagaacaaagcatgatataataatacaaaatgaactttcccacatgtagagttaaaagaaaagcttactgtatacttgggaactggtcaacttttttagtaaaaatttgagtctgtgacaagcaaaattttaaattctaagcaccaatgactttccccaaaacaggacccttgttctcttcccagcctttgtctagatcagcctggccttagggtaggtgtagtcacaactatagctgttgcctgcagcaaaagactctattccagccctcgtctccatcctagcctttaagagtccagggttgtttccaggagcctccaacattgatctactcaaaaggaggccacacccccaggtgtctcatggatgcagtgcttctgtgcccatataagacctacatttcacaaatgtgcccacagagtggaagataggcttgcatgagagttcataaggaacctgctttctttatagtgtgtgatatctgatcctcttgctgagatgaaaccctgatgtatagaagaaattctgggaactatagattattgtgcaaacattctaaagaagcgcgatacagtctgcttctgtttggagtatactcacctatccatcttgggttgttgtttgtttgtttgtttgttttgttaatgctgctttattttggtgctattttatatgtatttatttccttaattattcctgatatgttagtttatgcccgaagttggttagagcagccttatgacagtttttgtttgcccgttttcatctttaaaggtatggaaacctgacaggcccaaactgtgaagacgatggaagccaaagttcacccgagtccaaggccgtgatccggaagtgagtgtgtcttccttctcattggcaccgttactaactctcagtcaggacagtgtcttggccaagctcaagcttggtacgtgagcgtggcggtgtgtgcctgcaatcccagcacttgcgaaaccaaggcagcagaagcgtgagtgtgaggccagcctgtctcaaacaaaaccaaagtagtttagcagactgtttcactcgtttggatgggtgctgctgtgccgtcttgatcccccatagtaccatggctagggctgaagagagggctcacttgttactttttttgcagaggactgaggttcagtttctagcacacacctggtggctcacaaccatcagtaactctagtaccaggggatctgattccctctttggacttctgagagcaccaggtatacacgtggtacacagagaacacattcatacaaataaaataaatatatctaaaaagtgatctaatggtactcaccgcccccccccccccggcagtaacgctgtgtgtatctccagcttaccaggcgatatttgaagggatataagataaacagaacacgtggccagcagtaacttgtcttggctgttgcagagtttgtgtgttagcaggagacaaagaataaacacaagagtgaagtatgtagcaaagaagtgtctgggctccatggagcatggctttatacggggtgagagaaagaggctatctgatctggtgacagtggaacgaacacagtggtatgaggtgtgagccaagcagtgtgacatccaggcagagaggatatggaagaggctgggaagatgggatagcaggaagacacagggaatagtgtggcgcatgctcaggatgaaactcaggatgcgttggaggtgcgaacaaagccaggatgtgagggacctcggggcggtacattgatactgatgctgagggacctggggtggtacattgatactgatgctgagggacctggggtggtacatggatactgatgctgagggaagaaggaagcaagcatggccacctaggttaccaagctgtgtgcaagccactgagtacaacacagcacagcacagcagcctaggttaccaggttggctgtggttagcatggggacggaggccagggtgcagtaggaagcctggttagcacctttacaagggtccaggcaaggggtgatgggagtctggatgcaagcaaggactaggggtgctctgcctatgcagatactgaaacagatagcttatctggaagaccaagagtggggttaggacacctccaagggctgtactagaaccccggctctctgagtcaggactgggagtagggatcaagtttgatgggcgtgtgtgtgtcagcaagtgagtcttagatgttaatgttgaggtaatcaatgagtctggtctcaatcaactttctggatggtggtgttctcttgggtcgcctgggtgtatttaaagccacactactgcctttgctttcctgggactaagggggagacagagaggagtaaggtccaaagactgggcctattcccttccttgttttgagttcctgaagttgaagttctggtgagggagactagaacagctgtcagggtgagcacagtgtatgccagaagacgtgtaaagcggagttccacatgggctacccagtgtccagtgctgccatgtatcaagtgaagaggactctgagaggtgacttcctgcccagcagtcctgggagttccagtgatgaggccaagtggttttagtggatggaggtgtggtagatggagagacgggggattcagatctcatagtacgccattgggggtgcggtgggggtgggtcaggaaggctttttggtttatgtaccaggtatggtccgttttaatgggcaattgtttccattgaagagaatgatctagaagatactgaagaaatagccatagtgtggagatagaggccactgtggggctgtgttctggaacagattggatgagtattctgagatccaaaaataatctctagtgtcaaatactcatttggggccaagaatgagagagtgggagcatacttggacttctctgtttagtttttaactctccaaaagatttcctgatgatttgccagccttagagaccataggtgtgggagtaaaagattccttttttttcttaataattttattacagaaatatttaatatacatattaaaaagtcaaggacaaagtatggtacaagaaaaccattacatnnnnnnnnnnnnnnnnnnnnnnnnnnnnnnnnnnnnnnnnnnnnnnnnnnnnnnnnnnnnnnnnnnnnnnnnnnnnnnntacaagaaaaccattacattgtcacttcaggagatggtctctgggaggagtgacatttgaaagacagtcaagccttggacagtggaactggccaggcagagggaccagcagagccaggtcaaggaaattcagtatatgtggaattttgaaaagcatcagagttgttggagctacttcatggtgtcgcatgtgagtaaggagcgtctgtggtgctgaagctaaggttaagctgagattacacggcagacgacttcaatcatccacctaaggtttggatttcccctagtgagctgcgggccagcagctatcaaggtttgtgtagacagagaacaattttaggatagatgatcaggatggggatacctatggctcagcatccttgaagctctttagaaatgaagacaatctgcttctaggccagtgattctcaatctgtgggtcaccacccctttggggtcacgtatcagatatcctggatatcagatattacattaaattcatagcagtagcaacattacagttacaaagcaacaaaataattttatgtgggtgtcaccacaacatatggaacttgattaaagggtcagagcaccagggaggttgagaaccactagtatagcttgacctaatggactggactccgaagcttcaggtccttgagtgagccctgagcactttagggttaggaaatcacaagattagagtgtttaaaattgtttttgctcatccatgataagtcactagaatatgatttttgtactggtgggagtttgtgaatatcctgaagagagagcacaggactccagtgactggcgtggctgagtaccgagctgtgagtggactcggcgcgaagcacattgccatccacacttgtgggaaggcaattagtctggaagtttaccatttgcttagtcacaggaagagccaggaggagtacagcctgagacgtacccgagcctttctgcttcccagagggtgtccttagactaagtaggtttgggggaagtagcagttgggaacattgattgtaccaagccatgttcattattttaaagtcccactgaaattaattgtacactcagggcactagtgtgggtgaaactccaggctaagctgttttaaagggctttggagttttaagcgcatgagaccttaacaaagagcttcacacattactcccctgaggggtccatcatctggggacaatagtcctttcccaaagccttgcggtgactgcagtgactcggtggaaagttcttgacccctttgctcaagctgagttgcctttttaaaagaattgtgtccgatgagcgcatagcactttattttataataggtcgctctgtccccccagactctggaatgttaaaaccctgtctcttggtgacctctttctttcttccactcccctttcttccagttttttctccttttattaatttgtatcccatgttcccattaccatcttatgctgttttttctgttgactgtccttctgacagagtccctctctacttgacctcccttgttttcctgagaaggaaccaagagaggaccccccaccccaatctgtatgtaacactgcagcccctcaccccccaacctgtatgtaacactacagactctcaccccccaggctgtaacactggagccccctcacccccccccagtctgtatgtaacactgcagacccacattccccaatctgtttgtaacactgcggaccctcaggcacccatacctctggccccagcacagggcagtgagtatcgccttcctcttgcctatggctacacagaaggcatggttttgtggcactgctctcacagggtgactttgtctcccagaagacattgactagcatttggagacactggttgtgcctaagttgggtgtgtgccactggcatctagtagcccgaggacaaggatgacagtagacatcccacaatgcacaggacaaggctggtgcctcccatttggtgctatgacattaaatagcacagtgccttggtaggaaaccctgcccgctgcacagactttgtgcacctctaagcaggctcctttgaagggtgtccacctgcgttccttctcataatcaggtgagttaaatcctgcggaggtccaggcagccacatggaaggtgagacgcccagctcctgtgccccactctgccccttaccagccaaaatggcctctgtgtagtcactttatgtctcttggtttcagggttttcatttgaaaactgagctctttggagcacacaacctccgagttcttttcaattcagtgatagctgatacaagtgtgtttagttttccaaaaacaaaaaccagaaatgtggtcttaagtactatcctgggcttttgagaaatttccctggctgtgttttcctctgagaaagcatatgtaacagactgaatcaaactgccagaaaaaggagtcgggctctgatttgcttattgttcagtcatgacgtcacagctgtttcctgccgtcataaataaataaagagcggagaagagacactgtgcctcgggggactacaaggagtggcaaatgccaccggtttcctttgctgtgcatctgttctcttgtgatttcaggtgggcagcacgaaacaggaatctagtgacacccaccttcagtttgtggacctgctgggaactgggagcagggactgggagtcactattggatttacccatgaaccccaaagtgcccaaaacggtttgatttttcagttttttttttttttgttgttgttgtaaactgtagcaggatccatatactttatataagcttacacgtaccaagttgccagtcatttctgatattttaaaatgacgtaatcaagctaacaaaggactataaagatggaaaatatggaaatacagatgaaacgtggtttctggagtcttgaacctgaactgcttggtgttctttatgtgtttaaaaaccaagctatcaggttgctcagggcattcccgcagtatccagacagtgtcagctggctcaacagagtgtctcaagttgccaagaattttgtatccacggcttccagcttttaagactgttgccacacagtgacttctggtgttaggactagagccacatagagaatgagctgtgcccgtgttccccaacccctcacccctaccccggactcctagacatgactattatttgggaatcaggaaacccacttcctgttatggacgaaaacaagccagctcccattcatctcacctgtgccctcttcatccttccgccagcattttatatgataaagcgctgggttttccagtaccagaacttgaaccagaaaggaagaagaaacttttcctaggacaaatttattgtagccattgaccttggaagtgaacagatgcagggaaggggcggtaaccacccacctgtcacacatggtttctttgaaatgtatgagagttctggggtggggggtggagtctgggtggaggaggtagggtgtataactttatttaaagagattaactcccccccccaaccaggcaatatactttattactctcctttaatcagtattctttaatgtagaaatagcttctgtttctttttctttaattgagtcccatccctccctttctggaatgccaggtctgttttctgaagccctttactatcaccatgcttcagatggttgaaactgtctttattttcctttccccatgagcagaagatacaatgtcgttcttgtaatctttctaatagactgggggtgctgaccccagggctctggctggtaagagagccagtagaaagtattaacccaagatgtcaggcatctttaaagaaaagctgaggcccggagttattagtgcctggggatagtacagcgaaagtatttgaaaactctccctggaatgtttgcaatcagtagtcattccagaaaacccagatgccctaagaaggcaattgaatttgagtgattgtaaggaaaatggggaaaagaagagagaattgaggtggggaacccgtcaaaaatgagacataaagctgagcatggtggtgcacgcctctaatcccagcactcggaggacagaggcaggcagatgtctgagttcaaggccagccttgtctacagagtgagttttgggacaaccagagctatacagagaaaccttgtctcaaaaaccaaaccaaaccaaaccaaaaacaagatataacacatgaggctcaggcatggaggtgcatacctgtaatgtcagcacacttaagtctgagtccagcctcggacacagagtcagtctcagtctcaaccaaacccagatgcatcaacagaagagtgcggttagcaatgccaccacggttagaagagctaaaggttacaatgtgagagaaatatgtatttatcctttaagtaaatagaagaaatagatgtgtcacattaaagagaaagccattgtcttttaaatgtctatacagggcacaaaaagaaaaggaaaactatagttttaaaaaaatggtttcttcttgtgagatgcaatggaatccccagagaggaaactggtgcgctgacagagaagagtcagtcagtgacttaagctggatttaaagcagttttctttaaaaagagaaaactcaaagatgacggtatcttatttttaagatttattgtttgtttgtgtgtgggtgccttgcctgcatgttgtctgtgcaccatgtgtgtgaaatgctataagaggtcagaagggtgtcagatcccccagagccacatttacaggcatttgtgagcctccattcaggttctgggaatcgaacctgggacctctgtaagaatttttaatgagccggctttccagacccatgacggtattttctacctgttggaaacagtttaacagacgtcctaaccagttatgttcctgtggattcttatctcagtagaagacagcggttttccccttgtgtctctagccccccccccccacctttgctgcctgtctgtggtgatcttgcttcagggtgcacttttagttattgtgtattttcttttgcccgcacaaatgtgtctagatcctgccatcactcaataggtccatcaatggaaggttaatcaaacttgtgtgctttgaccaagatcaggcagttaattcagggccaagtgtgtacagtcaagttcagccgggcatcacacagaggtctttggttctcaggcctgccatttagggccacacgtggggtttgctagcaataagagcacatcagtacccccaaacccagaccagtggggtcctcaaatagctcttgtgaaatgtgaaaatctgacttggttccctcgggaggaaatggtttgaaggatctgaggaaagctgaaggaagaccaagtcagtcccatcaaaggagggcttgcttcctgtccttggtacctggtagcacctgacacctccgagggaatcgccatccagggtgaaacttcggcaggttgtaagtagaagccccctgtttataatgcacaaactccttcttcagacctgggaattggggagggagttagtgaggtcctgaaattagaattttgatgaatggctgattcacttttctaataatagttagaagttattgattgctgagtgagaacaatgcactgtgtgtgctttaaaattctcctaatgaccttctatgttgttccatctaccagagagtaggatgggtggtgggagaacttgtccagggtcatgcaatggatgagacagtgctcggagttagccaaggccatgctcttacagcctggatccttccattcttcccccgtgataagaatgaaaatatttcacataagtgtggaaatgaaagacagatgtgtgagtaaccttgactccgggttaatagggtccaggcgcagctcatcctgcccctgccatagacagcttttgtctctgtgtaccttcctctgcctggctctccttgaggtggtttttaactccctccccacctcccttgcctccttgtgcttccatcttgattttggctttctttccatttatttccgctggccctatcccagcccctccttccatcccaccctgatgttttaatcctaatttaccacaaacaccacagtgtgacaaaggaaagtcacggaagctgagcagatgaccctgacaagtccagatagtactgtgtccctttttctgggaagaggggagaagaaaagaagagaaactttgtcacactctttgttctttctcatcaaggaaagcatcttgccgatagcctctgcctggcacggttccctaagactcaggaaaagcattctgtgacttggagaacaaggtggagggcccagctctgtcagggtcaaggttgacagcatgcattacagcccaccagcatggcttagcaggagcacagccatgttccccagacattcgtgttccccagacaagtgcagtgctcttagactgcgttttctccccctttgcgccaggatgtaatcgagtttgtagagaatgtcctagaataaggaaacattctgctattttttccaaaagtttctgtgtgttatcttctggcaatgattaaatatgagctatcatctcaaataggctctagggcagggaaaacatacctctaagtagacggaattattctttttgtgtagtggtagtcttatttctggcttggtagctatacattaagggagagatgctatgcccccaaaccactgcattaaacttatttattctaaagtgtatagccaccattggaattttaggataatctgatatacctactcatagtctccaggtttgtcacatctgtgtttggagggcagctgctactttgatggcctgtcagtcctctcactatactctacaagcccaaaggcctacatgtcgctgggaagtgtggaaaattttcctgtgcttgcccctttagcaaggcaccctgctaaccaggtgttaccaagtacaacctgtgccagccaaacagtcagtgggcatagtnnnnnnnnnnnnnnnnnnnncgccggtgaaactccccgtcccgagtttcctcccgggttttttcttcccggattttttctcgtcccggaatttctcgtcccggatttcagcaccaatgtcttactcgcgttctcacgcccggccaggaaagacgcaacaaaccaaaatcttctgcggcaaaactttattgcttacatctttgggaaccaggagggcaagcacccagcgcccagccccaaaaacgaaagccccttcaattacatctttaggagccagagctccggcgcgcgcgctctattgtttacatctttaggcagcgagcgagcgcagggcgcgcagagccagagagatgccagcgagagagaatggcggaaacaccccgtccccttttttaggagcgttatatttcgcctaggacgcatcactccctgattggctgcagcccatggccgagctgacgtttacgggaaaggtagagtacaagtagtcgtaatacccttggctcatgcgcagattatttgtttaccacttagaacacaggatgtcagcgccatcttgtgacggcgaatgtgggggcggctcccaacaattaaatatgagctatcatctcaaataggctctagggcagggaaaacatacctctaagtagacggaattattctttttgtgtagtggtagtcttatttctggcttggtagctatacattaagggagagatgctatgcccccaaaccactgcattaaacttatttattctaaagtgtatagccaccattggaattttaggataatctgatatacctactcatagtctccaggtttgtcacatctgtgtttggagggcagctgctactttgatggcctgtcagtcctctcactatactctacaagcccaaaggcctacatgtcgctgggaagtgtggaaaattttcctgtgcttgcccctttagcaaggcaccctgctaaccaggtgttaccaagtacaacctgtgccagccaaacagtcagtgggcatagtatgtgtcatctaagtttagcatgtatcacctgggcatagcttgtgtcacctgggcatagcatgtgtcacctgggcatagcatgtgtcacctgggcatagcagtgtgcttgtgtcacctgggcatagcacgtatcatctgggcatagcttgtgtcacctgggcatagcacgtgtcatctgggcatagcacgtgtcacctgggcatagcatgtgtcacctgggcatagcaagtgtcacctgggcatagcaagtgtcactgcgatgtgctcaccccctctttctgtactttcattaagcacttctcaagcctcctcagtgtttggctgtcttacctcgagacccttgcttcagtgctgctccagtttccatgctaccgattccgattccttcttatccttaagatctcagctcctagggagacccctcctgaagctttgaccaggttccctgtgaaggacagtacttctgtgggtccctgaaccctttgttgtgacatttcccacataattagtgagtgggtatggaaaacaaagagtactcagtaatgcgagtttggttacatagattttccctgaggtctctcctggaaggaagagcctcagacgtgaccttagcaggctgcacacgtgggcccgtgaccacagatttctttcccataggcttttgcagcaggagggaaggcgattcttgctaagaatgcccgagggagaaagctgtacgctggtaatcccctctgccttcaggcatgactcctggagctgccacccatctggcatgtcggtcagacttacgcttccatttaggacagaggagtgaccatcaaagagttactttggataagaaagctgtacatcggcgtttctccttaatgcagactgctgtataatcttactaatctttccatctggttttttgtattcctccagtctacatatacttcctgtcttcttgttaatactctagtttgatatctttgaattgctttgccttagtgtgacctttagtgtgtatgtgcaggttggtgtgtgcatacatgctcctgcccacatgtgcagcatttgttcaaagctgtgaccttcttccagcaggtgtggggtcacaaatgttgaggcacaatttgtctccgtgattggtggcaaattctttgagttgatttcaccaagccaccttcacagccccttccttctgtgacccttggtaggtcattgtaagcatattaccaattttgagtttcttgatgtgtctcagaaggtcccattgacattatgtcatttgaaatcaccaccggtcagtgttggatagatgcaggcaggtgtttcctgtcccttctccgggtaggggtcagtgggaccatgtgaacaaactctccaagttgtcagatggtgagaagttggggtttcccttctcccagccccttcttgttctgtgcacaggggcaggtgatttccccagtgggataggctcctttgcctgcacttttgtaactgcatccagtatctcccttcctggtaaggttccttaattctcccattcagtcctggagaggagcagagccaaggccaggaagatggaaaagctgctgttccctttcctctgtcatatttgcgatgtcgctttccttcttggaatcttaacagcccggcatttgtatctactgcttgttctattgagaagggagagtttcttcccaggcctggcaaacataaggctactgtgaacttcgggcaagggtccaggcctttccagaaaccctccgttcctggcaagctgaggagttctgctggacggagggcaagggtctgctcctttgcttagactgtctctgtttttctcttctctgatttcttccttctccctatttattctgagtgtgtgtgtgtgtgtgtgtgtgtgtgtgtgtgtgtgtgtgtgtgtagaaaatgctttttctgtctaagattgcaatgaattctcaaaacctccgtaggcttagccatgggaggtcacagttagagcagatatgatgggaaagtccctcaccagagtgagttaaaagtattaggttaaggacagaatgggctgattcgaaccatggtctctccagcctttctgggctccttctgaagctgtgacttttcttggacacagactgcttgagtgctttggggagctgctcatcatgtgcacagatatagaccaaggcacacattttataattgttgacaatcacaagaacctggaagttatttccctcccctcccctcctcattgtgtgtgtgcgcgcgcacacgtgtcctttattttaagaattataaaagtgttcctttgcaagaatctagtttatatatttaaatgcaggttttctgtgttctggcatcccaactatgcacctataatattctgtgctcaccaaagaaaggaaaattacttacaaattatatttgttataaaaaaataaacatttgcatggtaagttgattttttattgtatttattctttaacagttttatacatgtatacaatgtatctttatcaaattttcccttccctctcccctcccacgcttgccggattcctccagacccatgctcttctggcctttgtgtttgctcctttttttttttttttttaatatcctactaaggccagttagtggaactatggaatattaactgttgataaatatttaaaagtatgatatttaagttcggtaactgaaaggagctgtgttaatggcatgagggcccccgaatagaaaggcattgactctcactgtgtgaaagttatgactctcactgtgtgttcctggctgtcttggaactggccctggcctcgaactcacagagatccagctgcctctgcctcctgagtgctgggattaaaggcgtgcgtcaacactgcccaagctcctgttttcaattttaatacaaagcccaggttactttctttcagctttctggagggaaatattgcttttgttaattttatctaatttaaagatttagattattaagtcacttctattatggtgatagtttaatgtctcttgtttcgtgtagatagttaaatattagcaatcctagatgccgtatagaccacagacgtgaaacagtgatgcccacagagagaaacagtcaccgtgtagacattactgctcttggtacttgacctccaaaagctgagttaactctcagtggacttttgtggcagccggtcctgattacagctcagctctttggtaggaaagtgcagctgggagttaagtcactgtaacaggctgctgggcttctgcacactggatactaacttctactctagcttttaattgtatgaacaatttgtgtaggtgtagtagataattataattttcctttttttgattctgattctgtggaacaaatccaaagaatacttgtgcacattagacagatgctgtaccaccgctatatcccaaaccctttcaaaaaacatttttgtggttctggagggatcactcagcctgtgagatgcttgctgcacaagatctacaacctgggttagattccccagcacccgtggattaaaaaaaaaattggatgtggtgacatgtgtttatcatcctactgctgcggaagcagagcctagagtatttctagagcttgctgaccagccatcctagcctatcggtgaccccccaggtcccaatgagagacccatctcaacagacaaggcagatggctcctaaggagtggcataggttaccctctgacctacacacatacactcttttgggtgggtgaaagagttttgtcactgtagctaagacagtgtggtttctttgccttgggatgcacaggaatttattgattctccctgataccttctccagccagcatcagtgaacatccctttcgatggagttgttttattagggaggcagactagcctggtgtggaactaacactgaagtgtctttgaagtcttctgacgatgaagcgtggagtaatggccctgctgcagtttacccctttgtcattgctctgactctgctctagagagaggagctccccgtaacttacaggcaacacccttagttactcaggaggtgtctgtagcgcaccaagcacccagagcgtatctggctgttcttgtgctttgacacccggggaaccttgtgactccatcacccagtggttcctgacacgccgtctcattataatttgagaaacaaagggataactttatgaggaaagctttggtccttgtgccaaaaccctagtgatgtttttaaaattaaacaggcatttccccattaacctggagacttcttactccagatgagttctagcctagtggtagccagttatgtcctaagttatcaatacggctacttttaggctacttttctgttttattacctttgttcatctatttgtgtgggagtctgaagggctagctgaagcatgctacagtgcaggctgtcagaggacaacttgttaacattgtgtgggacccaggcatcactgagctcagttgtcaggcgtggtagaaagtttcttatttactgtgtcatcttgatagcctggttttctggtctttaatttgagcaaatgcacagttagtggcttgtgtttggattgtttggaactcagtaaatcctcttctcatctttcgtctgccttggttggattttctaacaacaaaacattattagtctccccaaccctcttcagctaccagctgtggggtccagggcctgtctcgagtcccgtaagcattgtgttcactgtgtctccatctctccttcccagtgccattgcttccatcctgagggcctggcttgaccagtgtgcggaagacttccgggagccccctcacttcccttgccttcagaagctgctggagtacctcaaacagatgatgcctggctctgacccagagaggagagcacagaaccttcttgaacagtttcaaaagcaggacgtggattccgacagtgagtacctgtttggtcccagggaaacctctactgggctctgcaatgtgggggctccccattcattgactcaataagaaaccctggtaccctcagaaaattgggataggtataaaattattgaactgtgaacctcagaaccctaaggtttcagagtgaaaagagggattttcaaggctggatttatgattttaaagattaaattgtaaaaccagctcagagaagctaagtaattgcccagggtgcctactgttaccaggaacagggttttcttgatttgtttttgttttttttaaactttctcttatcaacatgaatgggcttcttctctgcctaatgtgttctatcagatataaacgggcgacaaccaaccaaccctgtgtggctggcaagggttcaagtccacgtccctctcacaaaagcttggaagaggtgttcctccttttccctaaaaagcattagtgtcatgtcccctggcagccccgattgctgacatcgactgtctctagtgaccgaatcgaaggaagtctctgaggctgttttttcctattggaggctgacctcgagcttccagggacaaatgcagagccaccactgctggccatagagtgtgctggctgccaggctctgcagaaattagtcaagaggttccatcgcgctccagcgtgatgatatagcctttcaccgaggcactgggtaacagttgccatggcagctgacccacttggaacttctggtaggcatttccttgaagtaatgtccggtttcctcagtgagggaaaggaaatggctcctaacgcagataagggatgctaccccaaagccaaagcaaatacagtgactttaaattctacccggtacctgttgagtggtttgtatggactggggaccagagaaggggaatgcacttgcatcatttggctcagattgccaaaggctttgtatctcagatgacttcatctgccgggaatgcttgaataccctggaagctcagctccagctgccagacctcagctcccttcagggcctcctcccgcctgcccgcccagctttgtgctctggtagaaaacgctgctgctgctgctgctgttgcactggagcccagctcgccccactggggctgcctctggccccatgcctaattggggaaccagtgggaccagtcattggtcctctccggctcagggaatggagggcagagctcttttggcaggcagaggcagggactagggaggtggcctgacctcacaaaaacttttaggcaatacccaagaatgaatcttttcctaagtgtgggcagttgtcatcaagaatgctccaggccctgtttatgaagtataggctccattcctgaagaggaatgttgggagcttagttagttcccttgtgcctctcaccccccagcccccatgtcatactctggaaagcagtgagctttcctgtgtgtttgcaaaagtaaaactgtgcatagagatttgtacataacccctggagactcaggcaggagcagtgaaagcatagaccaggtcccagagagaaaggatcacaggtttcacacgtagtgacattctaggtgcatgccagatttacaaggaatgaatgaatgaatgaatgaatgaatgtgtgagtgagtgatgttagtccttaccctgtactctccttggcagaagctggacagcttctgcattgttttataggtattaaagtacattgtagtcatcaggaggggtagaaggctccttgaacctttgattggcacatccgatttcttcttcactgaatgagaaagtgccagagttgagtggagaagtactgacatcaggcgctagcatcctccactgggtgggattttagctctttgatgggtgcttttgctttgtatccaggataacaggaatagatagtgaagctctcctaccagtcccattcacaacagaacgttcagctctgaggtccagagccagtcctgtaatcacagccctgccaccagagcgggcaggtagcacatggtactggacaggtaacagtctcactttgagcaccccatttctcaatggaagctttgaagaagctctatcaattcaatataagatgcctaacagcgtcccccataaagagaaggaaaaggcttaaaaaacgtaaccaggcagggggagtagtaacacggaactggatttctgcctggatgccactgtgtgcagctaggcttccccagccccagcagaagttcagctttgactgaaagggaccaagaagtgtggtgggaatgagagggcctgggagaaggagacttcaaagaggaggctggagctcggcccttcagcatttcagatgggctcctgggcagtgattcccgttgacttctttaggctctgagctgtgtaactttaggatggatgaccagcagtatagggtgccagggcatttatttccaatctgtttctcaccttttcactctctatgtgaaagctgacagcaaccctttgatttagcagcatttgagtctgctcagtattgttaaaaggactacaggtctcatcacatctctgaaaccccaatgacctatcctaccttaccaaaccttggccggccgccttgctcagtcttttaggcatctggctctctgtggctcaacaatcaaggcttgcagggctggggtgtaggtattagctggtttggtcctggaaatgttgatggagttgatgggggctgagatgaggttgtgttcagttttgcctctttagtttttgcctgggctagcctctgagtgatttctcaggggtcactcaacacctctctgagcttaataagaacacgagaatactcaggattgtatctccattttgctccaatatatcgttcttgttcgtctctacctgtggttttctgaagagttagcccttttcttcctgaatgaaagaagtgtagtttgacactatgaccaaggcacccccatactgactgttttcccatcgtggacagatggacttctcaacaccagctccttcagcctggaagaggaagaggaactggagagcggagggtcagcagaattcacgaacttctcagaagatctcgtggcagaacagctgacctacatggacgcagtaggtcttctcactgtatctcagatgtgtctctacttaaaacgtggggtggtggcagtactgttggcccagagggcagtgggcagcacggggagtgtgccacaagtcctactgagtctttgagagagtctgtgtctgtaaaaggagagttaaggctctgtgaatcattcgtgtgaataatttaagcctcggctcttcttgcagccctgggtgaaagtgcattttcctcagagctcgggtcacagagggaagtaagaattctaatcctagcgaaacagaatctaccttgtgctgtgggtatttctctccctttggactcataaatatttcaagagccgaactgtttatttgaaggactgtaaaggggtgaaagccggagtcagtttgaagtaagcccatggagcccacatgtgaccatatctggcagcccatctccacgtgtgcttcctgcacatttgaattttgaccgtttctgtgtgctgtgcacatttgattgtgttagtcacacttcatagcttggagtttgctggaaaacatagtcaaagaattagcagttaccacggtggttttgctcttcggcacttagcttttgcagcatatgaactggctaaagtttccatccaatgggaatgcagatcaagtatggaaagtagatcacgtagtctatcttgagcacacgctggccatatttctataccagcttttatacaccctatattcagttgtacaaatgagaatctgacctagtcagccatttgttgttgtgtaactgctagagtgagggaaagaaaaaatattttatttttattgctttaaggaaaagacctgaaaaccaggctctaggtcccccattcttctgcgagtgtgtaaggttgtctctaggtctcccattcttctgcgagtgtgtaaggttgtctctaggtctcccatttttctgtgagtgtgtgaggttgtctctagaccccccattcttctgcgagtgtgtgaggttgattgttctccctttgttagattctttctctgctttgaaacatgagactcagttgcactgagagattcggcatgtgtcatgcttacacggacttctttccaggtggccgcggagcatctgtttgcatggtagaagcggtgttcctgagtgtctggccagatgaccattctcagtttccttttttcattagcagcaccgtcgtacgagagttacttgacttttgtggcgaggcgggaagataaatatggctttgatgatttaaattttcttttggtcatcgttttccctcagttaagcaaatttaaaagatcacatggaagtcagggcatggcggctcacaccttaaattccatccagcattggagaggcaggcacaggcagatctctgtgagtttgaggccagtctggtatacatagcgacttctaggatggccaggactatatagagagcttctgtttcaaaaaacaaaaacaaacaataaatcatgtgggcctttctgatccattcatccattacttattttgtgtgttaagatggacaccatgtggcaaggcaagcagagaaagatgacttgtccacttacaagccaccaatttccagatgtcccagatgacacgttgtataaagcacccgtgtgttcctgatgtcaattcttcttttgtttcagcaactattcaagaaggtagtgcctcaccattgcctgggctgtatttggtctcagcgggataaaaaggaaaacaagcatttggctcctacgatccgtgccaccatctctcagtttaatacgctcaccaagtgtgttgtcagcaccgtcctggggagcaaggaactcaaaactcagcagcgagccagagtcatcgagaagtggatcaacattgctcacgtaactgccttttaaaaacttatctttgtgtttggtatacagccttcctgacatcagacatgaattatgttctgctgaggcttagaatctagtctgtcagagccaccattcccaccccacatgtgtcttgtgtctaacacttgtgtagaggaaggcacggtctctaacttgtcattgatctattttgtgagttcctagtgtgttcaagttataacattatactttagggctataataagagagaccacaactgacttagctgtacaggagccagactcactgaagtgacctcaccctttgcaagacaggggtcagcaatagaaatggtatagaggtggaggagggaaaagttacctctgagtagcgagatcaaaaaagacagtagtggggctggagagatggctcagcagttcagagcactaactgtccttcctgaggtcttgagttcaattcccagcggctcacaaccatctgtaatgggatccgatgccctcctctggtgtctgaaggtggcaacagtgtactcataaacaaattaagaaagaaagcaagaatggatctcactttatcaaagagtaggactttaggttcttaagatgaaagttttcttctaggcaagaagaagctccagtgagaaggaccatgaaattagttgatgtagaaattccccatcagcctgttctgggccgtagctaacgtagctaagcctcatccagaacacggttagtttcgtgtcccattagatgcatgtttccaccatgccctatgtataggacacaacacccaagtctttcacattttcttttattgtttttgaccaaagagcaaagccacaatagtttcagagattttgccttgttttgaggctttaagatggcctatttatttccccacacatgccagtatctggaccaaaaaaaaaagcaagaagtaaagcatggacactgtaaagaatgtccacaaagtaactgcagctgtggacaaagcgtgggcactgtaaagaaagtccacaaaagtaactgcaaaaggctaatgtaactgtggtactggcatggggtgtctctttcttcttagaaacgtaagaaaatatttttctccaacatttatgtcccaaaagccaatggtctttatgcctcgaattcactgaactccttagacagccctgtgtgggcatagtgactcagatcataactttcagttgaagttaaatatagattgtgtgtttacatgataagagaactctgaataactccaagtatatttcccatcccatagcatgtgcacaaagcccagagtccttagccttgctgggacaatgggttttctcccagtgttgagtatgttatgtctcttgaaattctggaggataacttcataaaatgctaagacttgctggtggttttctgccaagatttattttattcttccttcattagtcatagtcgatttctgttgaaaaaaaaagcttgaaaaatgatattaattttacatgtagaaactatttctgacctaatatgggtgtgtttccttggcctggcctctgctgcagtgttggatttacactgcatcctttggaatatacctccttttctagaaacaggactggatgcttcatgtgttcctgtaagcccttagccccagcctgttactgaataatgtgttccatatggttattacgatggacatgatatattggggcctgggtgtctttatttattgcaagtttcctgatttttagagcataattttgagatgctgaacctttgttgaaccatgctgtcagagagaggtttccagacagcagcagggctacaaccccctctgtccccgctgtctctttccctctccctccctccctttctcatattcttcactgccattgccttccttccttctctcccttcttattttcttcttccctccctctttctgccttttctctctttcaccctcacttgttatatcttaccttccttcctctcccccctccctctctccccctccctctctctttccctccctcctcctctgttttctttttaaataaatgggattccagaacattttaaaagactgggcatgacttttatgaagtacattgaaatttactctgaagaaaacatttgaggtttggttagcgtgcaaaattttgtcatgacaaattggacaattctgttttcacttcatgttccagattaaaatcacttaggaaaaatgattcttgaagcaagttacatttatgcccaaccaccctggcacctcttgcctgatatgctcagcatgaagccaaacatgtgcccctgtattgcattcagctgtgagacctccatacatggcactcctgcgtacctatgaaatatctcctctgacctagacagacagcacattcactggatgtggccacacctccaggccagccaacaatgggatcctttccctgttttactggccctactatgtgtagggttttttgcctctagggccactgacaagtttggccccttagggtagggtacctttaagtaaggagcctctcttcttacccagaaaaatgacagccaaaatctttcctgttctttctctgttttgttttaaaacactgccaaaatgaatcttatttttaaaagcccaagttattttgaaagccttgaagtaccaaggtgtttctgaatgtttatgattgtgggacaagccaatttgaaaccaaatgaatgtgtataaaaatattccccccttggctaagaccatgaaagctgaagttcaacttgtggtgaatttttattgccaagttgtatacacctctcatgccgggagctctctgtaccatctgaacttagggcggctgcttgcagctctctcggaaggccggaagggcacagtggtcttcctcatggagtcttagggcatgcgcatgctttctgcagagcaaagttacactcgctacgtagccatgtatgctcaccaactcgagttgtttttactgggaaagctggaaaccataaaactgtaacaacaacaaaaaaatatattgggagggtggggggaacaagcttacagtgccaaaatctataaagtgttttggtgactggggcaggaggaaggagccactttttgatgtccagtatttatacagctgcctatttagtggtaagaattcataacagctgtaatacctctaacacaggaaaccagcaactcactgtaatactgatatttaaatgccttttatgtctccgtcactccccacacaggaatgtagaatcctgaagaatttttcctccttgagggccatcgtttccgcactgcagtctaattccatctatcggttgaaaaaggcttgggctgctgtcccgaagtaagttccccagtgcctgctctgttgttctggctcgggtgatgggttgcttcgtctgtcccatgcgtccttaccatcagagtgcatatcatgtgacaggggaaacatggttgaaaccctctgtgtgtaccaggaagagtgcatcaatgaatttcgagggtgggcagttacagaaaccacactccttctctgtgtgccagagccatggtcaccaggcctgcgatgctgtagaggtgtgcttgttatcgggatcttgagggatgagattgtggagtgatggagttgggtagtttgtgtgacttctggttatttttcagcctcattccaatggcccgagctgcgccatcgtgtgagggataacatgtgccttaacgtctcagttcttgagctttcgtaggaagacactgtgtccacttccgctgcagcgtattaaaatgtcttagtgaggggagcggcggggctcctttcacggcgcctgactgagattattctcgttctgtgctgtgttttcttcatacttcttggtccaacctctggaataatggacaacacagagatcttatctgtcattactgtattcttcctacatctggaactttgcatgtggaccagaggcttgtttattccccaaaggaagggacagtttgttcctacattagttcacatttaggtatcttaggtagagtctctactgctgtaataaaggccatgaccaaagcaacttaaggaagaaagggtccattgtggttcccaattctaggggctgtagaaggcatagcggtggggacaggaagtggctgatcactctgcatctacagtcagaaagcagagagcattgcctgctggtactgaacttggtttttcctttctgttcagctcaggactcggcctgtgggatggtatgactcccatttagggtcaggtcttagttcctgccctattgctgtgaagaaacaccgcgatcaaagcaatttataaaggaaggcacttggttgggtacttgcttacagtttcagaggattagttccccaccatcacagcagggagcatggtggcaggcaggcacggcatgggagaagtagctaagagattacctcttttcttttctattttagtttattttagtttagtttttggtttttggtttttcgaggcagggtttctctgtatagctctggctgtcctggaactcactttgtagaccaggctggcctcgaactcataaatctgcctgcctctgcctcccgagtgctgggatcaaaggcgtgcaccaccaccggctcttttctcttttctttcctttcctttcctttcctttcctttcctttcctttcctttcctttcctttcctctctcttcctctctttctctctctttcttttcttttcctttctttctttctttctttctttctttctttctttctttctttctttctttctttcttttatttttctctttggttttttgagacaaggtgtctctgtgcagccctggctgtcctggaactcactttgtagaccaggctggccttgaactcagaaatccacctgcctctgcctttcaagtgctgggattaaaggcatgtgccaccactgcctggcaagagattacctcttgatccataggatgaggaagggagagagcgagagacaggggagagatgctggatttattatgggttttgaaacctccacgcccagccctagtgacacacctcctccaacaaggcttaacacacctcccaatccttcccaacagttctacaaacagggaaccaaccacccaagtgtaggagcttatgggggacattctggtttgaaccaccacaggtgggtttttccacctcaaccagatctagaatttttttttacagacataatcagagatatacttccatggtgattctaacatggaaactattgctattaatcctgtaagaggcccacattggcaagacagggttttgtaagtttatgctgaagactgggtgccagaggagatgagatgattacagatgagatgagacatcactgtattggttaggttattctttgatgctctttgtaaagtaggaggtaaaataaatgatggtgaccctagcacgcagaaagcagagctggtggacctctgtgagttggagaccagcctgatctatgtaggaaattctaggctagccaggaatataatgagacccccccccatattttttaaaatcgtaatatgcttcatgttacagagccatggaagccacaacccacggactacagggctcaagcacaggctttgcaaatgcagtgtaccatcttgtggctcccgctcttgtttctcttcctctctccttttttacaattttcaatagtacatgttactctgtatgacagagatgagttgattaattttcctctgagcatacattgaatgaaagatgtaggtcctaacaagccattagctggctgttgataccaccttcccttcccctcattactgtttctcataaacagaggaataatcagacaaatttcaccggtgaaattcgtctgacttcaggggaaaataatcacgaccctttttggtggttgacaagtacagtttacgagtatagaaagtcacctctccggcccaggatttcttctccagcaagtctgagtcttaaactacaacttcaaatgctagcacacatggggtgcagggatggctgaaggattaagagcaccccacgtcccaggccagtcctttgttcaggagccaatcaggagccaccccttagctgatgctcattagacactgctgactgaaaggctgtgcacgtgcaggccggcctctggctttatacgagctggttctcatagaggacctgagtttagttcccagcaccacattccgttcatgtgattccagaagagcagatgtctctgatctctggatctctgagaacatcgaactaatacacctcacatacacagacacacgtaaacacataatgaaaagtaacaaaaataaatctttaaaatactagttcacagtatgcatgttttagttttttgggttgccaaagggaagatccattcttccagctgtctttaaaacaacttttcaaaaacaaaagaacaaaacaattctcaaaactcagttctgttggccatgtgtgatttgctgctgggtgagtttacatgttaggaaggatgctatagagcatcacaggccctttccacttcagtcttatgtgctcgctgaggctaaattgagggggagcagagtcaaggtatcttctttacccctttcatcatcataatcgtttacatttctggctctcagcagacagaggctaagttcttacttccttctattgaaatacttgtataattaagttcttattttctccaaaagaaatagttttcttggtttcgttatacaaataatattatactcattaaaatgcaaataagtcttaataatggccttttatgctattttatgaaaatgaagcttttattcacatggagatttggctgctaatcatttgtggcgttgagcatcatcatccattcagtgactgtggagagaggtgtgtacagacagacaagaagggtgctcctgaggggcagtgcatagggaggggcctgaccccacaggtgctttactgtgccaccctgcagtaggcttcctgggtacagaggagaaaattgaagccagaaagttaagcgacttgtctaggatcgctaatgaagtagtgaagtgaggtttgaacccatccaccatgtctgtagaaccccgatggggcccactctgactctgagatgacccaggatgccaaacatttgagttctatatctgcagtgctcaacagttaacagtgaagtttgggtgagctcttggccatgacatttttctctctacacttaggtgtctggccaaggtgacctctgcaggactctgtgtattactaggataaatgttttctaaacttacttaagggaacatctctctagaacttgatgccccaagggaatcatcttttttttttttaattaaataggtataattagaaaaattcttcctatcgttctggtaaccatgttaatcttttacaaaggcttttgtcttagtcagggtttctattcctgcacaaacatcatgaccaagaagcagttggggaggaaaaggtttattcagcttacacttccatactgctgttcatcaccaaaggaagttaggactggaactcaagcaggtcagaaagcaggggctgatgcagaagccatagcgggatgttctttactggcttgcttcccctggcttgctcagcctgctctcttatacaaccaagactaccagcccagagatggtcccacccacaagggtcctttcccccttgatcactaattgagaaaatgccttacagttggatctcatggaggcattttctcaactgaagctcctttctctgtgataactccagctgtgtcaagttgacgcaaaactagccagtacagctgtgtacatgaagacactcattagctccccaaatcctgaggtccaaacaatctttccaggcaataagtactgaagacagctaagcttaggtgttggatttcctgtgtctctgttgattattttttcttcatcttccttcatagggacagaatgctgatgtttgaagaactttcagatatcttctctgatcacaataaccatctaaccagtcgggagctactaatgaaggtgagcatcgtgggcagcctggcacctggggagagtagcttgaaagctgcttaagttccttcagcctccagggaagcagaagttttatcttatacgtaatctgcgaaacttgggagtgagaaaattcaaagcccagttgaggttttctccttcagcctttcctccttcccacccacataacggacatcaaagcctgggttcaaatgtgtatgtgtttaacaagcagatattcagtaccattagttgcatggatgagaggccttggagtatcccttcttagcaacacttacaacttaacaactcttacaatgacagaggccagcctgtaagtccacatctttttttggtaccacattacacaatattgtttcagtcagcaatgtttattgaacaccagataagtggggcctcctgagcgtgttgggcaaaggtatagcctgactcattctacttctttagaaatgtgttgaatgtctagggtttataaaacattgaacttgtctttagaaatatgaagactgagaacagcctctgtgtgtaggagttcactcatagttgatgactgtgagcactatatagtgatcactcaataatgacaaataactttacacacagtcattggtcagttaatacaggccagtcattatcatcacagtttcctaccatctacgtttgtcatctttattgtgtagatagctaaggtccataggtagatgtagcatgcctgccattcctaagattcacacctgacatacagtattgctgaattgtgactctaccttggggacattcaaaggcccatgccttgtcccaatacctgctacagtgccttgcatgatgatctatacatccagaaaccattgtttgactgcatggactaaggggcttgtcattcacatatctctgtctttttcctgtcctggttccttctaggagcagctgataatagagtgggcagtatatgctgatgtgtgatgaactgcacactaaccaaacaattcctgggattatgttactccttgtttcacatctttctggatttgcagactttaaatggaaacccatctggctggaaggacatggcttagtggcctcccagtctgcaacacagagctagactaactggagccacacactgaaatcccaatagccctgaatcatccttccaaaggcagataaattgaattgtatgcagctcattgcctggtgacagtcttctggctgaaaccttagaggcaaggctatatgtagacattaaagatcccataaacctttctcaaatggagacatccacctcagtgctctaagttaaatgtcatataaggctcaaatatcccaacgaagtgaaaaccttggcgatgagctgaggtggcctgcacactgtcatgagtgttggtggaatgcttcggcgctctgtgtatttatgcagatccctttcccatcatctctgttgatcgttattcatgagaactgtatagttctgggtggaagttctcagcacagttgtaaataatgagatcaaggtacttaagttctcaaagtaagcactaagaaaaactactgggccctgttccgagtgtgttactcctagactgatttatagttgggcaaccttgttttaaagcgacctgtcttctacttgtgggtgaatagaatgtaccacttctctatactatggcccagacagcagaataattagcaaagatttgtgggcttccttttaactgttaagaaagatttttttttaatttctcttcaaagtctgtcttaaatttattataaccttgtgatttctgaaacttggattaattacaaatcattgaatctatagatttcaaaacaacaggaaagcagaataccaccaaatattggttcttgtacctcttgctagatgacagttattcctggttgcaataatataaacaatgtctaaacacctgcaagagtctgactctggtggaaatgaatggtcagtgaagctcgacagcatgttaatatcaaggttggagcaagacgccattcacactgtgaagacccatccaaacataactttccagtagcttccgagctgcaacgtaaccatcatgtcttcaaatggagccagcacccagcagacagtcatctgagacctaggataagtctccgaggcacaggaacaacagaaggcagctggattctgcaaaagcagagatgaaggaaaagcgagacaaggggagaaagctgcctagggaaaggctggaggttggagctcaggaggagcaggtccatgtgagaggtttgaggaagcacggggagatgactgaagtcacttccagggagaagtctgtgggaaaacaagatgacttgggaagcaggaagaggaagcaggaaaagtagccaggagtgtgagcagcaaaggaggaaggagcagcagaagcctgggacagctcagggctgctggggtgcggtggcaatgtgaagagtttcaggccagcagaggaaataaatgcgaattttggatctgacaagtgactggatttctggctgacatccattgggaaaagctagcagcgagcagtcacctcttctttctttgtcctttctcttgtctttggacagcattttactgtgtgggtaaccttgacttcatggtgtttcccaggctggcctgggactcatgatccccctgccttgacctcccaagtgctgagattatagggatgcgctgtgcatggctgacctgtcagttttgtgtgagtcctgcagccagggatgcaatctcatttttctgacactacaatcatgaaatcagcaaatcttgctccttgtctctggtctttcactcccctgctcataggacggagcgaggcttcagtgctccttaagatgcctgagttgctttatgattcttaggttttaacttttttgaagtccctactaagagttttagataagcctggcatggtggacaccacctttagtcccagcacttgggaggcagaggcatgtgactctctgtgtagcctggtctgtatagtaagttctaggctagccagagatacactgttaaactctgtaaaaaaagaaagaagaaggagaagatgaagaggaggtagaggtagaggaagaggaagaggaagaggaggaggagttcttaaaagaactaaagataaatctaaagataaatccaaaatagtttctagcactttccctctacccataattgcggttctggaagaagtatacattaggaagagatgggtgcttgtcttcatgtcagacagagttgatttttcactccaaactaaatcccgaggatctgggagctcttgcagctacctggtatgtgaagtggcacatcctagattcctgtcatgtgtccccaagaaaactgtgctctctcttatcatctgtggtagagacttctgagatggactctgtccccagtggcatgcacagccaggatcccagctggttactgacagaatgcatttttgccctgccatcattatttcaggcacccagaaggattccttttgtaattgtatggtgatgtaaggtcacatgctaaggtcatgtgataaagcctggagaaactgactaaggaaaaaataacatagaggttacactgaattgtgaaattgccatccattcaagcagttcctggaaaatgagaactaaacaagaccctgaaaccacaaaactgaaacattttatgttcagtcagcaaacccatgattagttgttaccttgaagctgggttcttgttccaggcagcaggcagggagcatgggtggccctctgtcctcaggccttaagaagaagggtagacttgtcagagttccaaactagagaggcatctaaggaggactaagggaaacccacaaatggctcacctttcactaatcaagatgtactccgaccctggacttcctcaagatcttgctgtgtaaagatttcatttagctaagtagcgccacacggctttccttcacagaatgctggcacactcattccaggccacgataacaagtcataaaatgtgcaagaggaaagcttcatttttaagatataacattactttgtgtgaaactcgagatgtacaaaaaaaaaaaaaaaaaacccatcttccattttgggagttgctgatcttatggtgatggttgattttctagtcaaattagggactctgcctttacagagccggggcggtgtggggggctaggcctgagggcctacaggcatggcatcttgggaatactggaagagattgtatcagagaacgcagataaccctttccttctctctagactggcatcctccatgaccttcctctgtgccctgtttcttaggaaggaacttcaaaatttgcaaacctggacagcagcgtgaaagaaaaccagaagcggacccagaggcgcctgcaactgcagaaggatatggtatgtctgcccattgtctgagagccagcaggagagaggcggctggcacatggcgggtgtcagcatattccttctgcaggatgcccacacttgtcagaagactcttccatcctgtgcctaatttgttcttaacctgggaggtctttagcaaaagtgttagatccagggaaaaatgaataccaaaagttacacattccacagacattttcatgtgaacgcttgaaacacacacacacacaccagatgtgatagagggaagtgtgcaatggggtacctccatcctcctgacatcgccacccgctgtcacttgcttgctgctgccattttggtaagaagcctcctaggccttgtgtctccatcagctttggggatgtaatggccaaggaaatgcattgtctcccgctgggaagatttggtctttgtatcagagaacatcattccctttgcttccaggctctctgatcactgcccagtctccttactattccttactattctagtcttcttactattaatattactaaccggatcatgttgttcacgtctcagagagtgccatgtgtcctttctgaaagcacaaggataattattatcgtctttgcctctgtccttaagttcccagcttttggcataaggtgtggggacagaagagcacattagagtctagacaaatgaatattttcttccttgcccaaagagaactttccttgtggatggatataacatagcgatgttttggggagctagaactctcctgtaacctaaagctgatctaactcaaagtgtttcaaactttttggttgttcaaagacagttaaaaatagctgctgccgagggagtggtagggattattttagttcaggataagaccttgcacacacaacagaaaggacaaactggactgcagctgacagtgagcttctgaagggcaaagtcctgtgtggtgtgagctggctgaggacacggctcaccttgtgccaagaggcctggtcttgccctggtccagattttgtgtattcctgccagtttccctaagtacctgcatatatgagaaggtgtctgtgtgccactccatccaccccccaccccccatttattttccctgaagaatgcttgcgcatcagtggtcttgtggggaacagagactcaaaggagatttggtgagatgagggttagaaaatccactcatttcttcccacttttaatatggtctaaagtggtagtataacagacaaccctaagaaatgcacacagacagaatagaatcctgccagttaaaatctagatttcacatggagtccacctgtctgttctgggactcaagtccagcgtaccaacggcacttagctatgatgatgttctaatcacttttggtccataacagcttcagagtcttgtttgtcatgacctccagagtcatcaagtcacctcgttgtcctgtagagcgtcctacagtctgggtttgtgtttgtttgtctagtgattaaacagaggtcacacctgtttggaaagcatttcacagagatgaagtactctcgcctcacattctctgaaggagttctgtggtgtcagtgtgtgtcagttgtgtggtgtcagttgctgtcacactgatggcgatgagatcacctaccattaacatggtgaatgaagactgccagattaacctgtctaaagtcactattctctctgtctttctgatggtcagtcactctgagtgatgccccacactcttgacagtctgcactccttcattcatcaggaaatagtgctctcttctgagtgatgatgctgaggctgtggctatcccgggcatcccaaacagctaggtgggtcaacacacactgaagagagcatcctgcaccgaccagagcctaagcacagtagacgccactgtggacactctgcatacatgtgtgatctcctggttggaggcttgcttttcctgaataaaagttagacattaggtcgtgcagtttctgtcctgtttgtgaaggctttaaaacaatttcattccttcaagagacactagcaagtccaaattagtctcatccaggtgcatgggttgtgacgcctttaacatttcagtgacagtaaaggcacttctctgcttccttttcagggtgtgatgcagggtaccgtgccttacctgggcaccttcctgactgacctgaccatgctggacactgccctgcaggactacattgaggtgggttctctgcagctggtccatccgtgcctgcagccttcttggccgcatagagaagtttgtttctctcaggatctgtttagaacccacaatacacatggctaggtggtaacacagcaaaccaaagcaaacaccggaagacgccagagatggcacagagcccatcaaaagagagcactgctcatcacagcagcagccatggctgggaacggcggcagtgtgggcaggaatgcagtgaaaactaagggacattagctgatagagcacggcctgctccacacggcctgctgcacacggcctgctgcacacggcctgatgcacacggcctgctccacacggcctgctccaccaggccagacgcgactgtgctgccttttgagggctggggtctgagcatcggtgccacagatggattggcagggataacctcccctactctctctgcctggatgctacagatgagataggttaatgaattttcaagtgggtcccggcctgcctctctgtaacgcctatgtcactgctgcctgttcaggggatatgcttggatccgcatcctgtcttcctttttcaatgaaggaagaggtaaaatccactcaaacgatcagataggcaaataggaaaaggtttgatatttgggagatttgaaggtaatttgtagggctcaacttctacctcagagcactcgcctctgatgtcctgattcggttcctagcgatggtaaacaaacataaatcacagaaaaaagcaaaacacaacaggctacaaaacaaagcagcctgcatctgtaccccatcccctgttctcctgtgaaacctgcagcatgggtgctgtagctacaaagggaacctggattctttaagaccacgcccactcgtttgcatttcccaggctctgtctctcagcatcctctgcctcaggaacctccctcccatcagggttgagaaggtgcagagtaagcgaatgctgaggaattacacccggcagtggtgatgaagaattgaaaccttgtttccacgaggctgtggagaagtgacttcccttatgataaatcattgacagtttggcttccagcacgaggccgtggccatctgcttttgttgactggcccagggcacgagggagcggattgcttgctcctcactagctgggcagatgtgtctggattctgactcacggattctgactcacgcctccgtcactgctattgtagttggtttcagacattttaggaaatgctccatcataagtaaagggacatttgggacatttgctccaggacaagggtggttgccttgctacgttgtcgccacgtttataaaatcattaatagttacaactttctcatctctttaacctattcactgtgaccccagtcagcacagggctctgcagttcggtggcttacgttcttccaaacatttctttcagggtggactgatcaacttcgagaaaagaagaagggtaagtactgccttcgcctgcgctttgctgtttaatttcacctggacatgagacactgaaagaagtgaaaagagattgtgttctttttgtttgtttttggagacagaaaaataatactcgctgaacatttttacatataccattatgttggtatgttcctacacattactccacaagagccctgcaagctcttttcccacatcttcagttaaaggtgaggatggaagagattaaggactggtccacagttaaggtggcagtgagctggagttcacattttgtcctgctgcaaatctcattaataaagaaaaggtagcgtagagctggcagcatacctcagtggttgggcacgtggtcagcatgcataaggtcttatatttgatccctgacacagagacagagagatgttgagagatttctttcctaccatcatcttcttcacagctacgtttagaaatacaggtttactctatatttagtaacagtgtatgaactataacattcatatataaacatatgaaaatcattgctgagaatatatgtgggatattcttctacaaagaagtatgtgaaacaactaatacgttagcttgttttagtcatttcataacaaatacatattccaaaatatgttgtatacaccttgtgtgtgtacatgtgtcagtgcttaaattaaaaaaaaagcaaacaagtttacttaagaagtttataaaagtgaatgacattaacaaagacgactactcctgtgggtgtgtctgggagaggaaaggatatagtgtccttattagaagtaggtgttatcttttatcatctttcctgtcagtattggaagggtgttatatatcaaaagcttgatctttcaagtagttctgcattatgttttttaaagatttatttatttattttatgtatatgagtacactgtagctgtctcagacacaccagatgagggcattagatcctgttacagatggttgtgagccaccatgtggttgctgggaattgaactcaggacctctgggagagcagtcagtgcccttaactgctgagccacctctctagccccctgcactgtgttttatttttttgaagtgtaaattttgctgtaattttgtgtcagatggatatgagataggcatttggtgtttggaaggaaaatgagcgagtgtggtaactccctgtagggcctgcctgtcatttactcttctattcatccacccatgctacctgcactggttgtatggttgtgtacggaccagggagtttgggaacttctgcagtggaaagccagagccttgccctcaggaagtgtataattcaggagggagataggcagatgaacaagcagccataacttatctatacaagctcaaagcagaggtctttcttagagaagcaaacaggaggctgaggctagcctcagcttgtgaggctagagaaccatacagggacaaagagcactgtgcgaacacagtgcacagacgctagctgggctgggctccaaagcaacaagataccaacatgaaccagccggagctttctgtccctcgtccactgaacttcctgtggcatggtggtaaatattcaaccatagcactggaccaagggttgagaccactgattggaagactaaggcccaacgactctgccaactcttagttgcttctgtcctgtcctgttacgcctccacagtgtgccatgcatgctcctttaacttcagcacgagcctggatgctaccttctttccctttaataataagaagctaaacatctatgaagttaaaatctgagcctaaagctgcagtttgtgctgagtgctgacattaagaagggacctggaagcgcctgacgagatccaagtgatgcggggcataattatacgtgcgtgcttctctgggagcttagaaggtgtagttagatgatttactggagtagtgaaaacccaaggatttggaaaacctaaacactcagctttctgagaccctggaccgcttagactgtcagtcagccccactggtgtggatttattgagggggaagaattggagaagctacttcgggagctgtgagcttcttgaatcatttttcttcttttaaaaataagaaatagaagtaaaaaaggtggtttttttttgtttcgttttgctttgtttttttacatatttcatgatcttatatttaaaagaaaaaaaaatcccaaaaccccaagaatggaaacaggaaggaaggtgccattatgcattgagttggtgactagccggcttctttggatggcttgttttatccatgtgagtttctttttcaagaagagaggattgagaaacgaggcatacaaggacttcaagagttgaagtgatgcatatgtgtattttaaaatctacttttacttgtgctggggattgaaaccagggcattgtgtatgcaccaggcatgcactccgccactgaactatagccaacccccacccctgagttagaacttgtaagatgtattcatttactctctaaggcagccagattgcagagtcttcttcaatggctttctccgtacgttacccttagagtgttacagttccatgtagaaaagacttgtatttatttcatcatattattcagtctcctggttttctgtctactttaggaatttgaagtcattgcccagataaagctcctacagtctgcttgcaacagctactgcatgggcccagaccagaagtttatccagtggttccagaggcagcagcttctatcagaggaggaaaggtaggctgacctgtctgtcttctgtcaggggtatggtggtcctggcaagaggcatgtaccttgccgggttatctgctagacagctcttgagtagctgctgtaaggttctggtccttgcttttcagagggaagctgattgcagaactagagggtgggttttaggtcttgtcctatcacttaccattgaagcctagaaggagtcttttattcctccccgtctgcaggacgcctatttgtaaaatgcttgctttaaagtgtgaagtcatattctggaaagccctattagaatagtagccatgctcctcctcatcactgcccctgccattgtcccagagtccatggtgtgagccttcagggagagaggagtggagatggggtggaggaagaggaaaaaagagatctcatgaaagatgaaataggagagcaaagtgctgtggacctgtgggcaggaacagatcactggccaggaagtggtggggcatggggaagattgacagctactaccaagtaggctgggctgtgaagggagatttcactagaagagctggagaacattccagacagagtaagataagaacatgagtgaaggcctggggtcctgacagtctgggtgtttggaggccagtgatgcctttggggtgggtgaggcccaggatgcagctttcaaaacattggctgacatacaaagaaaggcacactgattctagtgttgtgagtactggcccagtggcttccgacctttcctcttcctctggtggttgtcagattagtctgtaggccatatgtggcctgccctctgttttcacatttttaagtggcagaaggaaaaaaaaaataaaagaatgtggcatgaaaagtagtcgtttgaaattcaaatttcaggattcataaataacgctttaatggaatgtagcctgctcatttgcatctttggttgctctggtgcattaaagatagaccatatggcccacagcctaaaatacttactctctggtctgattcagagaaagtttgctgatccctgaggtagacctgagcttttctctgaagagtggaatgaacagcaaataagtatttgtgagagttggggctttgaggggcagtagagtcccaacaggtcggcctggctgctccctagctttgaagtgcaggaatgatgggcgtcatggcccttcttccaattcaccctggacctgtgctagctacagacccaggctttcccaagaaacactccaaagcagaaactccccttgtgcatgtatctgttagcatttgcctggcacatcaatatgtgaagcagaagcatttatagttgaggcagcttttggccattaaagataatgtcggtagttacatttatatatttttataactaatataattcatatgtctattcaccaaaggttagatattttacaaaaataccctctttcatttttctaacatgttagaaaacaacataatgtgtacctagacacagtcacagtcacaggaggaagcagaaaggaagggcagggtgattcacagnnnnnnnnnnnnnnnnnnnntggggttagatgaggatgatcaagggcaggctgctgtcagcttcagctcttgccagtgccacacgtcctggagttgaagcctgcagaactggacaggctctatccatctgtctctgaaaggggtaggggaggaggaagaggcgtgcagtggaaagttatcagccgtggccgtcagcaagctcccgccgaggctcgtgccacgacaccacagtccacagctttcctttggctgtgcagaaccttcctctgaatccggcattccactaaatcacatgggttgggaatctgatcttctgtacttaaagattgacctcaaacctcccctgtctttctcagctacgccctctcgtgtgagattgaagccgctgccgacgccaacaccacttcccctaagcctcggaaaagcatggtgaagaggctgagcctgtgagtcccctgtcaggggtcctgtcagagaggggagaggaccgtgcattcagtagctctgaatgctcacttgaagggtgcattttctgtcctgaacacaaacaactcattagatccatccgttcctgtcctggacacgccagcaacggttctgcagtcatcttacatagcctagtgatcctttgaacagtagattatgtcactttttaaaactcccaatggttttattttgaaataaagtctcaactctaggtcctagtttacaaggccttatggggtctactcccaaccttccctcgcttacaacagttcaccaagattcaccacaccagccttctagccaaccttaaacacagcaggctgttgcctgctcagggccttcacactagcccttcctgtggctagcagtggtcttttttcctagccagcttcagatgttagcatgaatgttttctcctaagagatcttcccgacggtgaggtctcctctggttattctcattcctatcggatgcttctcacagtctagaggaagcagtgttataatagaagcattcactgctcatcatgtgtagcagacgaggaggccttctgtggtcaactttgaaagacctcactccatttggataacatccagaggccttagaccatctataggaccccactgcccggaagcattagtaccaccctgtcggcctggctccacctctctgtcccctctttctggttcactccacactttgtacttcagctacctcaagacctccccacacaccaggcagtcgtttttagttgcttttgttctactaacttttctcccaaagagccacctggctcactttctcacttcctttgggtgtttgtagaaatgtcatcttgacaagcgtgttggacactgtagcccttcatcatatctgtccttgacaccctcccttgattgtcttctgtcttaattttttttccatcgcattatcttcttccgccatactgtatactgtatgcgtctgtattgaacttaaagtccatgtagagaagcctcggttgtatttgtcgctcagttcacagggtctaaatgctgcccccacccccagtaagtgattagtgagtatgtttagaatagataaattgagctgagagctaggactgttataagaacaatgcatatgtttataaaatctacaacatgatctaggaaccagtttctataattagctccaatcacagagcccaggaaaccaaagtatggagaaggtggttcaagcgcttctaatagaggaccagaaagcatattcagattcagctcagagttaagcttacagaagttttactgtacagtaaaattacattctgaaggaagagagagatggaaggtctaagggagaggagagagaaccacaggagaggaaaaggggactagaaaaggtactcataagccgggcatggtggcgcatgcctttaatcccagcactcgggaggcagaggcagaggcaggcggatttctgagttcgaggccagcctggtctacagagtgagttccaggacagccagggctatacagagaaaccctgtctcgggggaaaaaaaaaaaggcaatcatgtgatgcaggctttgattgtatctgtgtctgtagcagcagcttgagaggacctactctgctccataaagctgaccattagaatgtgagggaccaaagacggcaggcgttacttctaggacgctgcgctctcacacagatcccggcacttacacacctgagactgatctgggtgatgttccctgcacttgctaggggcaaacagggcagtctttagggaccattggccagttctccatggtcaagtaatttcccccggcacttgccaagcccacccgcagacttctcggttgtcgtgagagtttgtgatgtgagagtttgtgatgtgagagtgcagtgcctcctggatccgtgagctgttatggctcagcagttctggaatcttctcaggcactgcatctgtctggtccctttgccaggctcagtgtctcctggctctgctcttacatgtgcacagggctttctgtgttttcattatacccctaacctctgttcccatagcttcatgtccatcaggaccatcatgcatagacacattatttcttctgtattaattcaggccaggccaggcagacgtccctgttgtctcctgtgtctgtgggaagatacttttctaacctgtctccttactgcgggtaaagccctttgagtgcctggctttatatagattaggttctctcaaccttactttagtaagcagaaccgtcatttcacagtgctgtgtatgtgttaacttcatacacatgaatcagttcatactgaaagcatatatggaaatatcaatggaaccccattattacgtataattaaattgtgctagtggtttttttttttttttaacaatgactgttttgccaacattcattccttctgtttcccaaccagagcatctgcagaaatagctcatcaacttccgactttcagttcccttttctgtaaggcctggcccacagggatttcccttacatataccagctcagctcaaagggggttataatacttcctacctagttattttatggagaagggtttgggttatgttagtttgccagatggctcaaagcagaagtgttcttccttggcttcttattcggaacacacccaccttttccagcttcacaaagtttaaagttcattttaggctaagaatcaataaggggtggggtgctgtccatgtaaaagatggaggaccaatgacttagactctgaccgcattagttaaacagcctatgtgttatttgaagctggacataatcaactgggacgtataattaaattgactatctagtcaatactgtttgttagaatattatagtattttctaaagcaatatttacaatagagcatacatgattgaaaaacattaaggggtttaatcagcacacattattcagtcagtcatgggttctaggtttgtaacagctcagatgtgtggcattctgtctcctgcaggctatttctggggtctgacatcatccccgggagcactcccaccaaagagcagcccaagtccgcagccagtgggagctctggggagagtatggactcagtcagtgtgtcgtcctgtgaatcaaaccactccgaggctgaggagggccccgtcacacccatggacacaccagatgagccccaaaagaaggtacacactaagctttcccataattctcctgttgcagctcccagcgtgctgcttgccacgtgaagagtgtctgtgtccaagtttttcagtacatcagaaacagagttccttctgggagcacattcctcagagaaaaaggatacaaagtactaaggaggttgcgctttcatttgtccctgcaaacatttctatgcccatatctaagtgcactgaaggattgtggcccataaaataaatatactctattcaagagatgcaggatcgcctgagtaggaacaaaacccgagaaatggatgcatgccagccttttggtgccatgcgctcttacccacacctgtcccatggcaggtcacacaggaaagtactctaaaactcagtgacgtagaacaacctccatgtttcttggggactggctactttgggccctacaccacagttttaacccaagcctgtttccgttatctgtcatttatttttctggagtaattgactttccaaaacatcctcttagcatgctgaaacatatgaagaagaggggaagaagcccagccctgtaagatacacacagggagagccctttcttggccatacctatcaacattccattgcttaaagcagtcatgtggtccaatccaacataaataactgaatcagggagatacgatctagcttcaatgggaggaaccatgaaacaattcacagggcagagggcgcagtttgcagcagggtgaggatttgataatggtgatacagtgaaccacagcggaaatagcaagctgtacgcacggatactggaatcctcatccagtccctttctcatggctgcacaaataagtaagagaaaatatctccttcagtccccttactggtcaaggagcttggctcagagatcagctctgccatgacagcaatccacagcatcttggggagagttttggccaccttgttctgtcatttcttctggcctcttggtttgggttcacaccagtgagagagagtacaggtgacaggctctgtcttctgccttgtagggggcactggtgttgctttgcatgatgtccttagcagtcacaccagtctgagacccttcaagtgtccccaaatcataattatatgccccagtacaggggaacgccagggccaagaagtgggagtgggtgggtaggggagcaggggggtggggtttaggggactttcgggatagcatttgaaatgtaaatgaagaaaatagctaataaaaaaaagagaaaaaagaaaggtattttaggactcagcagctagaggtgacccaaccactctcaaattcctcagacagctaacatctgactattgtctcaaaagtcatgtgtcctaaacccagtatgttgtcattccccatgccttggcatcagctggatccagaggagatagctcagtgacaacgcacttgccacgcaaatataagtccctgagttgagattcctccaaagtacaaaaagccaggcgtgtatgtccacctggagtcccagagccactgccgtaaggggaggcagagacaggcgctccccgcaaggctccttctcccttcttccttcttccacgcctctctcttgctcgccctcgtgaggttgttctctttagaagtaaagtgtaatatgcattcctccttcttcgtgcgcctgatcatcacttataaacagttacctttatgcttgttccacaccacttatatccttgtgaggatagtctctataactcgtgtgagctcaccatcctaacgcattaccccctcaactataagtgttattagcatcacggaaagcccaagggaaataggacggtgaaagtgaaaacattcaagcagcatttggagaactgaccttcctggctaatagacttgcaggcaagataacgctgttaaaattatccaccctgagtaagtgctcaagctgagtcacatgggcacagaaggagaattccaaacagcagcagcacatggctaaccgatatcatggcagtcctactgtagacactacatattagagttggcattgcggtttgctggccataatagaacacccctgctgtggaattgtccttaacataggatgccatcggacgaagcagccctgaaaaactacagataacataggccctatttttttagaagccacattatcagaaagctaaattccttgatctgtatctgtggaatggtagattatatagaaattaataatgagttttataggattattataatataatccagtttaactcattccgaatatcacacacacacacacttttctgtaacaattgatatttaaatggttcagcttaatggttttatgtcaggaatacatcccggtgagtttaaagcatctctttgtctggtgattaatatcagttgaattttaaatattcagtcacttagagaagcacattactgcagccgtacatctctcaaatggcctcgatgtagattgtgaaagtgtatcttgctggtcttaccagtgattgttaaagagatactcaaaggctgcgttgtccaggcaagtgatctgttttgctgagtcgtgctctcagcattgttatgatgctgtttttagggtgcccctccctccccctgccctgcaaggcagctgtgacccaagtgagaaagataaatgaaaactcattaacagtctcacagcactaaaggtttcaaggctgtagcacaagtcagctaactcatcatagctgcagatggcttggtgcttgctgtgcagttgctgtgtgcttgctgtgcccctgctgtgtgaacaccacagcaaaggggatggagagctctggtcctggtaggagtgagactgtgtaggtggacctggggccccgtgttttctctgggcctccagcttctctacttggcaaaggggtcaggtgatctctgaggccctctcagcagaactacacaagcagtagtccttatcttagatgcttctaaacatgaagacatttgtctcctactacaaaatctggatgtgaagtagtggggacagaatgttctccatggccacattgagaactgttgggggtgagaagaggatggcttcccagcttctgtaagctcagcctgtacggcctttaaattctggtatctgctgccatctcgtggttagccttcatacggacaactaaaaccaggccatcaaaggtccactgtgcctttcttagattcagaatgattagttcccagtgagtcactgatcgtcacatgagcccacggggtgtgtgtgtgtgtgtgtgtgtgtgtgtgtgtgtgtgtgtgtaccagagacatgagatattgaggaggaaacaaccagtctctgtatctacttctgttttgaaacgtgaagcatgtttggtccaggctccaatggctttgttttctgattcttccagctctctgaatcctcctcttcctgttcctccatccattccatggacacgaattcctcagggatgtcgtccctaatcaaccccctgtcctcccctccaacgtgcaacaacaatcctaaaatccacaagcgctccgtctccgtgacatccattacctccacagtactgcctcctgtttacaatcagcagaacgaagacacctgcatcatccgcatcagtgtagaagacaacaatggcaacatgtacaagagcatcatggtaaggggccgtcctgcctggagggtcagtcagctgttcggacacacatttctcatacctgtctgcacgtgcacacaagactagcatggaaaatagcagcgtcttcctgggcgcagattagtggtatgcttatctagtggcacatgtgcatataggacatagttttgacattttatgaattgttcatgcaatttggggtcctgtttcacgatgctcagtgtgggtgggacagtagtccagggcgggtgccttgcttcacacgccttcttggaactcttcctacgattgcactgtctactaaattaacacgccttctcagtagtgtagttcctggtgactcagctttctccctaagccatctggaccaagccgagctcctgaagtgggtgattatggcggaggtgcagtttgggtaggaagtagctacagttcagcagtaaatgggattgagtctcatgtgcttcttacacaaacggcatcagacaaggaaaactccaaagctacttctgatgatggccgtctttcttaaatacacacccagcctttcatgctgataaccttaactgcgtaaagtcaacttgtggtaggtgatgaaattccttagtcagcagggcccgtcatcgactaaaaagaagagaaaaaagaaaaagaaaagagaaatctctgtagtaaaatctgcactaaatttcatgtcttcatttgcctcccagcatagacctaggtggggtggagtcattgttctttaacctttgcggaaccattcattgaatacagtaattattgaagatgggttcttgctagttcttgccccgagctttgaggagagagagaagagtaagactcagtgatctttgaagaacttggaatggaagagagaggccatatactaaatgatattctaacagaagccagaccagattggaaatggtctagtgtcctccttgggggactttgtgttaattgttcaggcagttaggtctcactgaaggcatcaagttaagaaatgatcaggtttgtttgttaggggcataactagccttgtggagacatgaagcttgaggtgggacgagcactgtgggtgggaagcgagccaaggaagctgctcccatctttcgagccggagatgataagggctggagacggaagagccattcatcctgttatcagcctttgataaccgttgtgccgggtaaggaagagggaggatttctatggaagagggaggacccacggccatctggcagccagtggctggtgaaactactagaggacgaggtctcagggtctttagaattgggacatccacatgacattgtttaatagattgccagaaacacgggtggtgcagggttggtgttgcgtgtctttcagccccattgagtgggaatgagtgtggaatgagacccagttcagcatcttaagggagtagctaacaaagatgcactggagaaacagcagcccaagggagcctggctcatcaatagtagttgtgtgcttctgttatatatgccagccagagagataggggccacctacatgaccacagcatctggaagcagaatacaaatgtatgcacccagccgttaatgctgtgtgccatgcccacggcagcatgctctgctctgccaggagaaagcctagcatgtaggagacatcttaggtcgaatgcgctatcctggtcttgggaaggtataaatagatgagtccccagactattccttccttggaatagggcctgcctttgggagaacactccctgtccctgtctcttcctgggaccctttatgttgcacagtgtgaaatattttcctcctttaaaattttgtgtgcaccagttctttcctttgaagtatataagccagatgttttagtattaggtacattcacgaagcccttattgctgcttattgaatcacaaacaccagctgccatgagggtcagagggaggcacctaggccctgaggaaatcaagctctgtgtgtgtgtgtctgtgtgtgtgtctgtgtctgtgtgtgtgtctgtgtgtgtctgtgtgtgtgtgtgtgtgtctgtgtgtgtgtgtgtgtgtgtctgtgtctgtgggggtatgtgtgtgtatgtctgtgggtgtctgtgtgtgtctgtgtgtgtgtgtgtgtgtgtgtgtctgtgtgtgtctatgggtgtgggtgtgtgtctgtgtgtgggtatgtgtctttgtgtctgtgtatggctgtgtgtctgtgggtgtgggtgtgtgggtgtttgcagacgcgtgccaagctccagcaatctgctcctagtgagagcagattttctttttacaaatgcatgacctgagttttctttcccttctttcgcctttaaagagatcactcaggacatggcattgggatgttcctctttcctgccacatgagctcagaatcaactaagcaggcagagataaagaaaaggaaaaccagacatgaggatgaacagaacacttgtgctttcatcagaaactggtttttattgacacgtgatttacatacagttacggatcttaatgttcactcagttctttcaattttaaaagtttgtatatatctgtcggccacaccaagactccctgtgaccttccaccagtcagtcccctttaagcttggggctggttttctaatgccacagatacaggctttatgatgaatgccatcgttatgtctcgtttctttttctcagcgcatatgtgagagtcttcttcactggtggaggtgttagctcttcacttgctctcctttagtggctcagaaggcctttgtggacataggtttttcatttctttagcaaatggtttgctgggtcatagaatctcttgtccttttttttccccccagtggtcagtgggcagagttatagccattttttcctattggttgtaagctaatgttatagcattaggctggcacattggcccagggctcattaatgccatatactgttcatagttccctcatgtatattcttttatttgggatcttagctaggctggagtgtgataggcagtacgtgtttcccccgttttagtggggggcactgtgctcaccaccgtccactcttcacctgctcattcagaagtagtactagcactcaggagccctggctcctcgtcctgttcatatgccacctactccatcaagacagcaaaggtcagaggtcaggagatcaggacacgtgagccaagctcaatccagatgtgtctgttgtctttgcagctgacaagccaggataagacccccgctgtgatccagagagcgatgtcgaagcacaacctggagtcggaccccgccgaggagtatgagctggtgcaggtcatctcggaggacaaaggtaggcgtgctctccacgacagcaggtgccagccacacgcacaccctgctcaggtgctgacagcagaaaggtcatgaagtgtcttccttttcatttggatcctagtgatggcaggggcatatgcacatatttgtatgagtgtatgtgtgtgtggccagaacagtacaaaatgtgtcctgctctctctgagcatgaagcaaggctggtggccagcaagcccaagcaaccctgacaggggggtaaaggggacggggctcatgctcacacagcaagtgcccttatccacagatctgcctctcatgccccctggtggtggtatttaggtgtgccagggagacaagctatgtctcgctttacagtagatcaagtgtctgaagctgctacccacccctaactctttgctattgtttctgggttttctgtagaattcctcttgcccactgtttgtgtgccccacgagaagtccattttcatgagcagtctctgtgtgtcatgagtgggaagcagatggaacctgttgggtctgggcaggtcctcacacacatcctttacttgacattgtgattctcggtcctgtctgacccagaagcactcatgccacagtgtcagaattttgttgttatttgtttattttcttttggtttttaattctggaactagagttacagatggttattggtgctgggaatcaaacccagtactctgaacgagcagcctgggctctttaaccttaagccttcctccagctccaaatctagctattttattttatttaaggtactctgaacgagcagcctgggctctttaaccttaagccttccctccagctccaaatctagctattttattttatttattttattttattttattttattttgaagtgtaggttctggggatgaaattcaggtccttgtgcctataaagcaagcacttttcaggtgtagccatcccctgactgtcatttgtaatacttaaatacagttgcagctaaaatgataaatccccaaagaggtctgttgaattgtagcatgtggcttcagagtagtgcaaaaggaggccagtggatctgcagatccagtggctcaaagagggaaacctgggctcagctctgcccccagctgagtgatctcaacaaatgccttgctgccgtcatccttaaccaactccctggagacaaaagctctctctggtctcggtaattatgaagtcaccataaataatacactggaaagggctttgcagaaatgctaactgctgtatagatgggagggccattatcgtggccccaaataggagagcaggggtgagaggactctctgtggtgttagtccttgtgaacacttggacaccatgtacctgtcttggagagcctgttcatcttgggctagctgaggggtcccggtgtgaggaattcaccggaagctcacctcatgcagctctgcaaccctgccattttcttttctgacctcacttccacaaaacccaatgtccacatctgcccattttattctatggttttcaaaacagaataaaacaacttttcattgacagaatttattacttcactggtaataacaacccttgtttataaactatgagtgttcaggtgggcatcactggatttgaatatgacttaaaaattagtggcatgcattgtcttatgtggatgtggtttagtgttgaaaggcaaatgctggacaaaacggtgactcaaaaagaataaatgaccagattgatttggaattatgtcaaaagtaccttaatttaatccaagtaaagatgcctgacaattgctgtaggtcttgtacacgtgcttggacacccttaggctgtgggagtacagcaggctagcaggggttctcattccagctctgtggtcctgggaccgtcctgtatttggtgtccctacccctgtaccttcttcaagttctaacgttctgtatttgagcagtacgctcatgggaggaattctgacaccttgtgctcagtttcagatagggagtaagttttttgggaccaattatgaggaagtatccacattgcttggtctaggttataggcaagaaacagagactctacccaggccttgtgcctgggcagaattggcttctgccagtcagggatgggttcccccaacccccactgaccagctgctgtttccttctctttcctagaactagtgatcccggactctgcaaacgtcttttacgccatgaatagccaagtgaactttgatttcattttacgcaaaaagaactcggtggaggagcaggtgaagttgcgcagtcggaccagcctgactttgcccaggacagctaagcggggctgctggagtaacaggcacagcaagatcaccctctgaaagggacagtacactcctactgcccaaggcagagtgaggctgagcaaaagccatggcgacgccaaccaccacccagtgttgagcatcattggtgaaagcgacagatatttatagaattcagctgtgcagagagcactgtgcaggggagagtggaagtgaatttgacattaaaaggataaaaggttc

SEQ ID NO: 223 - DNA, 3746 bp, Mus Musculus
cggtcgcgcgcggcggcggcggcggcagtcgggcagcaaggcgcgtgggaagcgcggggacccggagccgggccagagagacgccccgaccgcctcggagcagggcgcaccatgcagcgtccgtgtgccggaaagaaaactgagaatgaaattactttggcaagctaaaatgagctcgattcaggactggggtgaagaggtagaggaaggagctgtttaccatgtcaccctcaaaagagtccagattcaacaggcggccaataaaggagcgagatggctaggggttgaaggggaccagctgcctccaggacacacagtcagtcagtacgagacctgcaagatcaggaccatcaaagctggtacgctggagaagcttgtggagaacctgctgacggcttttggggacaatgactttacctacatcagcatctttttgtcgacatacagaggctttgcctcgactaaggaagtgctggagctgctgctggacaggtatggaaacctgacaggcccaaactgtgaagacgatggaagccaaagttcacccgagtccaaggccgtgatccggaatgccattgcttccatcctgagggcctggcttgaccagtgtgcggaagacttccgggagccccctcacttcccttgccttcagaagctgctggagtacctcaaacagatgatgcctggctctgacccagagaggagagcacagaaccttcttgaacagtttcaaaagcaggacgtggattccgacaatggacttctcaacaccagctccttcagcctggaagaggaagaggaactggagagcggagggtcagcagaattcacgaacttctcagaagatctcgtggcagaacagctgacctacatggacgcacaactattcaagaaggtagtgcctcaccattgcctgggctgtatttggtctcagcgggataaaaaggaaaacaagcatttggctcctacgatccgtgccaccatctctcagtttaatacgctcaccaagtgtgttgtcagcaccgtcctggggagcaaggaactcaaaactcagcagcgagccagagtcatcgagaagtggatcaacattgctcacgaatgtagaatcctgaagaatttttcctccttgagggccatcgtttccgcactgcagtctaattccatctatcggttgaaaaaggcttgggctgctgtcccgaaggacagaatgctgatgtttgaagaactttcagatatcttctctgatcacaataaccatctaaccagtcgggagctactaatgaaggaaggaacttcaaaatttgcaaacctggacagcagcgtgaaagaaaaccagaagcggacccagaggcgcctgcaactgcagaaggatatgggtgtgatgcagggtaccgtgccttacctgggcaccttcctgactgacctgaccatgctggacactgccctgcaggactacattgagggtggactgatcaacttcgagaaaagaagaagggaatttgaagtcattgcccagataaagctcctacagtctgcttgcaacagctactgcatgggcccagaccagaagtttatccagtggttccagaggcagcagcttctatcagaggaggaaagctacgccctctcgtgtgagattgaagccgctgccgacgccaacaccacttcccctaagcctcggaaaagcatggtgaagaggctgagcctgctatttctggggtctgacatcatccccgggagcactcccaccaaagagcagcccaagtccgcagccagtgggagctctggggagagtatggactcagtcagtgtgtcgtcctgtgaatcaaaccactccgaggctgaggagggccccgtcacacccatggacacaccagatgagccccaaaagaagctctctgaatcctcctcttcctgttcctccatccattccatggacacgaattcctcagggatgtcgtccctaatcaaccccctgtcctcccctccaacgtgcaacaacaatcctaaaatccacaagcgctccgtctccgtgacatccattacctccacagtactgcctcctgtttacaatcagcagaacgaagacacctgcatcatccgcatcagtgtagaagacaacaatggcaacatgtacaagagcatcatgctgacaagccaggataagacccccgctgtgatccagagagcgatgtcgaagcacaacctggagtcggaccccgccgaggagtatgagctggtgcaggtcatctcggaggacaaagaactagtgatcccggactctgcaaacgtcttttacgccatgaatagccaagtgaactttgatttcattttacgcaaaaagaactcggtggaggagcaggtgaagttgcgcagtcggaccagcctgactttgcccaggacagctaagcggggctgctggagtaacaggcacagcaagatcaccctctgaaagggacagtacactcctactgcccaaggcagagtgaggctgagcaaaagccatggcgacgccaaccaccacccagtgttgagcatcattggtgaaagcgacagatatttatagaattcagctgtgcagagagcactgtgcaggggagagtggaagtgaatttgacattaaaaggataaaaggttcactgatgctcttagatctgagagtgaatacaaaatagtccatattttaaaatatatatacacacgcatatcgtgtgtgtatgcgtgtgtttgtgtgtgtgtgtgtgtgtgtgtgtgtgtgtgtgtgtatgtagatataccagagggactatacaggatattctggactatggaaaaaccaatttgcacaatggcctgggaagttgaggtcactttttacagggaaacagaagggaccaagaacctggtctcatacttccaagtaaatagaattagaactaccaatgcggagtgttcttcatgccagtattacaagcccaggctcttatttttgtaaagggagagaattcctttctcagtcatgtgccaccagatgaccaaacagcagagattgacatggccataggctgcatgaaaggccaccatggaaaggttcggatgggtcagtggtctctgccccctgctggagtctgctggagcatctgaggcctgtgtgccttgctggtccccgtcacaatgcccctggggtcaacacaagcttgtttcaattcctggaaaccctgttgtgtttctgcattctctcctgaggaacgcaccacaatcattaccacacaggtagcctcggtcttccataacttttcagccagagaagaaagcgcagaagcacagcaactcctctggactctcctctgtcttggaccactccaccaccctctgattgcctttgcatgtagcagtgtacatccggtcgtttgccatctttagctgtgggcctctgtcttatgagcagttcttcctcaggtgtagacatttctgctgcagtcaactccatgcaatcatttcaagcctgtgaaagattgaagagtcgcgctcttctttctcacctctcacttactctcctggtggcgctggtaagtgatgggttttgtctgtaataacagtttcattctgtgcttccgatctgcgctatgctgggatctgaatggaaaagccatacatgaaggagctgacatgtataagaagcactttcaaattattgttcctttttaatttttttctccaaataccagtttttattccaaaaataaagagaatgaacccagaatacg

SEQ ID NO: 224 - protein, 768 aa, Mus Musculus
MKLLWQAKMSSIQDWGEEVEEGAVYHVTLKRVQIQQAANKGARWLGVEGDQLPPGHTVSQYETCKIRTIKAGTLEKLVENLLTAFGDNDFTYISIFLSTYRGFASTKEVLELLLDRYGNLTGPNCEDDGSQSSPESKAVIRNAIASILRAWLDQCAEDFREPPHFPCLQKLLEYLKQMMPGSDPERRAQNLLEQFQKQDVDSDNGLLNTSSFSLEEEEELESGGSAEFTNFSEDLVAEQLTYMDAQLFKKVVPHHCLGCIWSQRDKKENKHLAPTIRATISQFNTLTKCVVSTVLGSKELKTQQRARVIEKWINIAHECRILKNFSSLRAIVSALQSNSIYRLKKAWAAVPKDRMLMFEELSDIFSDHNNHLTSRELLMKEGTSKFANLDSSVKENQKRTQRRLQLQKDMGVMQGTVPYLGTFLTDLTMLDTALQDYIEGGLINFEKRRREFEVIAQIKLLQSACNSYCMGPDQKFIQWFQRQQLLSEEESYALSCEIEAAADANTTSPKPRKSMVKRLSLLFLGSDIIPGSTPTKEQPKSAASGSSGESMDSVSVSSCESNHSEAEEGPVTPMDTPDEPQKKLSESSSSCSSIHSMDTNSSGMSSLINPLSSPPTCNNNPKIHKRSVSVTSITSTVLPPVYNQQNEDTCIIRISVEDNNGNMYKSIMLTSQDKTPAVIQRAMSKHNLESDPAEEYELVQVISEDKELVIPDSANVFYAMNSQVNFDFILRKKNSVEEQVKLRSRTSLTLPRTAKRGCWSNRHSKITL

SEQ ID NO: 225 - DNA, 3987 bp, Mus Musculus
gtgctgctgccgccgccgctgtcggtgccagccgctggttgttggggtccggtgtgaagtgtgggtgaccggactcgcgcgtggggtgcgatggactggctgcagaacctagtcccctgcagtctgcaggagtatgaggcaaagtgatgcccagctcggaactagtgatcggagccctccattcggaccgtgcgccgccgggggctgccttcccgagctgagagccccttccccggcttggacttttggcacgctgtcggtgggaggtccccaaggacggaatcgaaaaggtcacttcttacctgtcagtgctgtgtgacagcatcgcgaccggacctgcagaatctgaactagcagattcgtaatgcctcctgcttacctctttcaagatggaggggacatctgtgggagagcctactcaagtggtgtctaaagtcaaactttccacaaaaggagaaaacacaggacactggctggtggatgatcatgctcgaatatgggaagttttgaagacagaggagagctcgattcaggactggggtgaagaggtagaggaaggagctgtttaccatgtcaccctcaaaagagtccagattcaacaggcggccaataaaggagcgagatggctaggggttgaaggggaccagctgcctccaggacacacagtcagtcagtacgagacctgcaagatcaggaccatcaaagctggtacgctggagaagcttgtggagaagtatggaaacctgacaggcccaaactgtgaagacgatggaagccaaagttcacccgagtccaaggccgtgatccggaatgccattgcttccatcctgagggcctggcttgaccagtgtgcggaagacttccgggagccccctcacttcccttgccttcagaagctgctggagtacctcaaacagatgatgcctggctctgacccagagaggagagcacagaaccttcttgaacagtttcaaaagcaggacgtggattccgacaatggacttctcaacaccagctccttcagcctggaagaggaagaggaactggagagcggagggtcagcagaattcacgaacttctcagaagatctcgtggcagaacagctgacctacatggacgcacaactattcaagaaggtagtgcctcaccattgcctgggctgtatttggtctcagcgggataaaaaggaaaacaagcatttggctcctacgatccgtgccaccatctctcagtttaatacgctcaccaagtgtgttgtcagcaccgtcctggggagcaaggaactcaaaactcagcagcgagccagagtcatcgagaagtggatcaacattgctcacgaatgtagaatcctgaagaatttttcctccttgagggccatcgtttccgcactgcagtctaattccatctatcggttgaaaaaggcttgggctgctgtcccgaaggacagaatgctgatgtttgaagaactttcagatatcttctctgatcacaataaccatctaaccagtcgggagctactaatgaaggaaggaacttcaaaatttgcaaacctggacagcagcgtgaaagaaaaccagaagcggacccagaggcgcctgcaactgcagaaggatatgggtgtgatgcagggtaccgtgccttacctgggcaccttcctgactgacctgaccatgctggacactgccctgcaggactacattgagggtggactgatcaacttcgagaaaagaagaagggaatttgaagtcattgcccagataaagctcctacagtctgcttgcaacagctactgcatgggcccagaccagaagtttatccagtggttccagaggcagcagcttctatcagaggaggaaagctacgccctctcgtgtgagattgaagccgctgccgacgccaacaccacttcccctaagcctcggaaaagcatggtgaagaggctgagcctgctatttctggggtctgacatcatccccgggagcactcccaccaaagagcagcccaagtccgcagccagtgggagctctggggagagtatggactcagtcagtgtgtcgtcctgtgaatcaaaccactccgaggctgaggagggccccgtcacacccatggacacaccagatgagccccaaaagaagctctctgaatcctcctcttcctgttcctccatccattccatggacacgaattcctcagggatgtcgtccctaatcaaccccctgtcctcccctccaacgtgcaacaacaatcctaaaatccacaagcgctccgtctccgtgacatccattacctccacagtactgcctcctgtttacaatcagcagaacgaagacacctgcatcatccgcatcagtgtagaagacaacaatggcaacatgtacaagagcatcatgctgacaagccaggataagacccccgctgtgatccagagagcgatgtcgaagcacaacctggagtcggaccccgccgaggagtatgagctggtgcaggtcatctcggaggacaaagaactagtgatcccggactctgcaaacgtcttttacgccatgaatagccaagtgaactttgatttcattttacgcaaaaagaactcggtggaggagcaggtgaagttgcgcagtcggaccagcctgactttgcccaggacagctaagcggggctgctggagtaacaggcacagcaagatcaccctctgaaagggacagtacactcctactgcccaaggcagagtgaggctgagcaaaagccatggcgacgccaaccaccacccagtgttgagcatcattggtgaaagcgacagatatttatagaattcagctgtgcagagagcactgtgcaggggagagtggaagtgaatttgacattaaaaggataaaaggttcactgatgctcttagatctgagagtgaatacaaaatagtccatattttaaaatatatatacacacgcatatcgtgtgtgtatgcgtgtgtttgtgtgtgtgtgtgtgtgtgtgtgtgtgtgtgtgtgtatgtagatataccagagggactatacaggatattctggactatggaaaaaccaatttgcacaatggcctgggaagttgaggtcactttttacagggaaacagaagggaccaagaacctggtctcatacttccaagtaaatagaattagaactaccaatgcggagtgttcttcatgccagtattacaagcccaggctcttatttttgtaaagggagagaattcctttctcagtcatgtgccaccagatgaccaaacagcagagattgacatggccataggctgcatgaaaggccaccatggaaaggttcggatgggtcagtggtctctgccccctgctggagtctgctggagcatctgaggcctgtgtgccttgctggtccccgtcacaatgcccctggggtcaacacaagcttgtttcaattcctggaaaccctgttgtgtttctgcattctctcctgaggaacgcaccacaatcattaccacacaggtagcctcggtcttccataacttttcagccagagaagaaagcgcagaagcacagcaactcctctggactctcctctgtcttggaccactccaccaccctctgattgcctttgcatgtagcagtgtacatccggtcgtttgccatctttagctgtgggcctctgtcttatgagcagttcttcctcaggtgtagacatttctgctgcagtcaactccatgcaatcatttcaagcctgtgaaagattgaagagtcgcgctcttctttctcacctctcacttactctcctggtggcgctggtaagtgatgggttttgtctgtaataacagtttcattctgtgcttccgatctgcgctatgctgggatctgaatggaaaagccatacatgaaggagctgacatgtataagaagcactttcaaattattgttcctttttaatttttttctccaaataccagtttttattccaaaaataaagagaatgaacccagaatacg

SEQ ID NO: 226 - protein, 767 aa, Mus Musculus
MEGTSVGEPTQVVSKVKLSTKGENTGHWLVDDHARIWEVLKTEESSIQDWGEEVEEGAVYHVTLKRVQIQQAANKGARWLGVEGDQLPPGHTVSQYETCKIRTIKAGTLEKLVEKYGNLTGPNCEDDGSQSSPESKAVIRNAIASILRAWLDQCAEDFREPPHFPCLQKLLEYLKQMMPGSDPERRAQNLLEQFQKQDVDSDNGLLNTSSFSLEEEEELESGGSAEFTNFSEDLVAEQLTYMDAQLFKKVVPHHCLGCIWSQRDKKENKHLAPTIRATISQFNTLTKCVVSTVLGSKELKTQQRARVIEKWINIAHECRILKNFSSLRAIVSALQSNSIYRLKKAWAAVPKDRMLMFEELSDIFSDHNNHLTSRELLMKEGTSKFANLDSSVKENQKRTQRRLQLQKDMGVMQGTVPYLGTFLTDLTMLDTALQDYIEGGLINFEKRRREFEVIAQIKLLQSACNSYCMGPDQKFIQWFQRQQLLSEEESYALSCEIEAAADANTTSPKPRKSMVKRLSLLFLGSDIIPGSTPTKEQPKSAASGSSGESMDSVSVSSCESNHSEAEEGPVTPMDTPDEPQKKLSESSSSCSSIHSMDTNSSGMSSLINPLSSPPTCNNNPKIHKRSVSVTSITSTVLPPVYNQQNEDTCIIRISVEDNNGNMYKSIMLTSQDKTPAVIQRAMSKHNLESDPAEEYELVQVISEDKELVIPDSANVFYAMNSQVNFDFILRKKNSVEEQVKLRSRTSLTLPRTAKRGCWSNRHSKITL
